(19) United States
(12) Patent Application Publication
(10) Pub. No.: US 2025/0241254 A1
(43) Pub. Date: Jul. 31, 2025

(54) NOVEL GENETIC LOCI ASSOCIATED WITH DISEASE RESISTANCE IN SOYBEANS

(71) Applicant: Syngenta Crop Protection AG, Basel (CH)

(72) Inventors: Qingli Liu, Durham, NC (US); Robert Arthur Dietrich, Durham, NC (US); Thomas Joseph Curley, Jr., Durham, NC (US); John Daniel HIPSKIND, Durham, NC (US); Becky Welsh Breitinger, Durham, NC (US); John Luther Dawson, Durham, NC (US)

(73) Assignee: Syngenta Crop Protection AG, Basel (CH)

(21) Appl. No.: 18/728,946

(22) PCT Filed: Jan. 10, 2023
(86) PCT No.: PCT/US2023/060373

§ 371 Date: Jul. 15, 2024

Related U.S. Application Data
(60) Provisional application No. 63/299,566, filed on Jan. 14, 2022.

(51) Int. Cl. A01H 1/04; A01H 1/00; C12Q 1/6806; C12Q 1/6895

(52) U.S. Cl. CPC A01H 1/045; A01H 1/1255; C12Q 1/6806; C12Q 1/6895; C12Q 2600/13

(57) ABSTRACT

The present invention relates to methods and compositions for identifying, selecting and/or producing a disease resistant soybean plant or germplasm using markers, genes and chromosomal intervals derived from Glycine canescens PI446934, or a progeny thereof. A soybean plant or germplasm that has been identified, selected and/or produced by any of the methods of the present invention is also provided. Embodiments of soybean seeds, plants and germplasms are also provided that are resistant to Asian Soy Rust.

### RELATED APPLICATIONS

[0001] This application claims priority to U.S. Provisional Patent Application No. 63/299,566 filed 14 January, 2022, the content of which is incorporated by reference herein in its entirety.

### FIELD OF THE INVENTION

[0002] The present invention relates to compositions and methods for identifying, selecting and producing enhanced disease and/or pathogen resistant soybean plants.

### SEQUENCE LISTING

[0003] This application is accompanied by a sequence listing entitled 81545.xml, created Jan. 5, 2023, which is approximately 936 KB in size. This sequence listing filed herewith via EFS-Web in compliance with 37 C.F.R. § 1.831-1.835, is incorporated by reference into the specification in its entirety.

### BACKGROUND

[0004] Plant pathogens are known to cause considerable damage to important crops, resulting in significant agricultural losses with widespread consequences for both the food supply and other industries that rely on plant materials. As such, there is a long felt need to reduce the incidence and/or impact of agricultural pathogens on crop production.

[0005] Several pathogens have been associated with damage to soybeans, which individually and collectively have the potential to cause significant yield losses in the United States and throughout the world. Exemplary pathogens include, but are not limited to fungi (e.g., genus Phytophthora and Asian Soybean rust Phakopsora pahyrhizi), nematodes (e.g., genus Meloidogyne, particularly, Meloidogyne javanica), and soybean stem canker. Given the significant threat to global food supplies that these pathogens present and the time and expense associated with treating soybean crops to prevent loss, new methods for producing pathogen resistant soybean cultivars are needed. What is needed is novel resistance genes (herein, “R-Genes”) that can be introduced into commercial soybean plants to control soybean pathogens

### SUMMARY OF THE INVENTION

[0006] Compositions and methods for identifying, selecting and producing Glycine plants (including wild Glycines and Glycine max lines) with enhanced disease resistance are provided. Disease resistant soybean plants and germplasms are also provided.

[0007] In some embodiments, methods of identifying a disease resistant soybean plant or germplasm are provided. Such methods may comprise detecting, in the soybean plant or germplasm, a genetic loci or molecular marker (e.g. SNP or a Quantitative Trait Loci (QTL)) associated with enhanced disease resistance, in particular ASR resistance. In some embodiments the genetic loci or molecular marker associates with the presence of a chromosomal interval comprising the nucleotide sequence of SEQ ID NO: 1 or a portion thereof. In particular embodiments, the molecular associated with the chromosomal interval comprising SEQ ID NO: 1 or a portion thereof, is any of the favorable markers listed in Table 1.

[0008] In some embodiments, methods of producing a disease resistant soybean plant are provided. Such methods may comprise detecting, in a soybean germplasm, the presence of a genetic loci and/or a genetic marker associated with enhanced pathogen resistance (e.g. ASR) and producing a progeny plant from said soybean germplasm.

[0009] In some embodiments, methods of selecting a disease resistant soybean plant or germplasm are provided. Such methods may comprise crossing a first soybean plant or germplasm with a second soybean plant or germplasm, wherein the first soybean plant or germplasm comprises a genetic loci derived from soybean Glycine canescens accession PI446934, or a progeny thereof comprising SEQ ID NO: 1, or a portion thereof, associated with enhanced disease resistance and/or tolerance and selecting a progeny plant or germplasm that possesses the genetic loci.

[0010] In some embodiments, methods of introgressing a genetic loci derived from soybean accession number PI446934, or a progeny thereof, associated with enhanced pathogen resistance into a soybean plant or germplasm are provided. Such methods may comprise crossing a first soybean plant or germplasm comprising a chromosomal interval derived from soybean accession number PI446934, or a progeny thereof, associated with enhanced pathogen resistance with a second soybean plant or germplasm that lacks said genetic loci and optionally repeatedly backcrossing progeny plants comprising said genetic allele with the second soybean plant or germplasm to produce a soybean plant (e.g. Glycine max) or germplasm with enhanced pathogen resistance comprising the chromosomal interval derived from soybean accession number PI446934, or a progeny thereof, associated with enhanced pathogen resistance. Progeny comprising the chromosomal interval associated with enhanced pathogen resistance may be identified by detecting, in their genomes, the presence of a marker associated with a chromosomal interval comprising SEQ ID NO: 1 or a portion thereof, wherein the marker is any of the markers listed in Table 1. Chromosomal interval from PI446934, or a progeny thereof, can be introgressed into a Glycine max line through the use of traditional breeding methods.

[0011] Soybean plants and/or germplasms identified, produced or selected by the methods of this invention are also provided, as are any progeny and/or seeds derived from a soybean plant or germplasm identified, produced or selected by these methods. In one embodiment, a molecular marker associating with the presence of a chromosomal interval comprising SEQ ID NO: 1 or a portion thereof may be used to identify or select for plant lines resistant to ASR. Further said molecular markers may be located within 20 cM, 10 cM, 5 cM, 4 cM, 3 cM, 2 cM, 1 cM of said chromosomal interval. In another embodiment, said molecular marker may be located within 20 cM, 10 cM, 5 cM, 4 cM, 3 cM, 2 cM, 1 cM of any SNP marker associated with ASR, including any of the favorable markers of Table 1.

[0012] Non-naturally occurring soybean seeds, plants and/or germplasms comprising one or genetic loci derived from soybean plant accession number PI446934, or a progeny thereof, that is associated with enhanced pathogen resistance (e.g., enhanced resistance to ASR, Cyst Nematode, Phytophthora, brown stem rot, etc.) are also provided.

[0013] A marker associated with enhanced pathogen resistance may comprise, consist essentially of, or consist of a single allele or a combination of alleles at one or more genetic loci derived from PI446934, or a progeny thereof, that associate with enhanced pathogen resistance. In one embodiment the marker is within a chromosomal interval comprising SEQ ID NO: 1, or a portion thereof.

[0014] The foregoing and other objects and aspects of the present invention are explained in detail in the drawings and specification set forth below.

### BRIEF DESCRIPTION OF THE SEQUENCE LISTING

[0015] SEQ ID NO: 1 is a chromosomal interval derived from Glycine canescens line accession PI 446934 referred to herein as “Scaffold 000454F”. Scaffold 000454F have been mapped to G. canescens chromosome 3.

[0016] SEQ ID NOS: 2-226, listed at Table 4, describe the DNA sequence of example assay components, including primers, probes, and target sequences, that can be used to detect and differentiate between favorable and unfavorable alleles associated with a given SNP position within the chromosomal interval of SEQ ID NO: 1.

### BRIEF DESCRIPTION OF THE DRAWINGS

[0017] FIG. 1 shows the screening of Glycine canescens (PI446934) for rust resistance against a panel of 16 rust isolates and compares the screening to a rust sensitive accession line.

[0018] FIG. 2 illustrates the rust rating scale used to measure plant phenotype.

[0019] FIG. 3 shows a depiction of SNPs from Glycine canescens PI446934 that are associated with ASR Resistance.

[0020] FIG. 4 shows chromosome mapping for ASR resistance QTL for Glycine canescens PI446934.

[0021] FIG. 5 is a marker association map for Glycine canescens (PI446934) where bands indicate regions/intervals of respective chromosomes associated with ASR resistance.

[0022] FIG. 6 shows a mapping interval from PI446934 Chromosome 3 associated with ASR resistance.

### DETAILED DESCRIPTION OF THE INVENTION

[0023] The presently disclosed subject matter relates at least in part to the identification of a genomic region, such as a chromosomal interval, derived from Glycine canescens accession line PI446934, or a progeny thereof, wherein the chromosomal interval is associated with enhanced pathogen resistance. In embodiments, the chromosomal interval is associated with enhanced resistance to the pathogen Asian soy rust (ASR), which is responsible for causing a disease by the same name. In other embodiments, the chromosomal interval is associated with the pathogen Soybean cyst nematode (SCN), which is responsible for causing a disease by the same name. As such, said chromosomal interval from PI446934, or a progeny thereof, may be introgressed into Glycine max lines via somatic embryo rescue (see for example U.S. Patent Publication 2007/0261139 incorporated by reference herein) or through the use of a Glycine max donor line having introgressed into its genome the genetic region from PI446934, or a progeny thereof, wherein the region comprises SEQ ID NO: 1, or a portion thereof. In some embodiments, the chromosomal interval may be introduced through a cis-genic approach. In still other embodiments, genes (e.g., Resistance genes) from the chromosomal interval comprising SEQ ID NO: 1 may be transgenically expressed or genetically modified (e.g., gene edited via TALEN or CRISPR) in plants to confer disease resistance (e.g. Asian Soy Rust (ASR) resistance).

[0024] In embodiments, presence of said chromosomal interval (SEQ ID NO: 1), or portion thereof, in the genome of a plant (e.g., a soybean plant) is associated with increased resistance to pathogens such as ASR, SCN, Stem termination, Stem Canker, Bacterial pustule, root knot nematode, brown stem rot, Frogeye leaf spot, or phytophthora, as compared to a control plant not comprising the chromosomal interval in its genome. In another embodiment, a chromosomal interval, or portion thereof, derived from PI446934, or a progeny thereof, is introduced into a Glycine max line not comprising said chromosomal interval, or portion thereof, wherein said introduction confers in the Glycine max line or it's progeny, increased resistances to disease (e.g. ASR) wherein the said chromosome interval is derived from chromosome 1, 2, 3, 4, 5, 6, 7, 8, 9, 10, 11, 12, 13, 14, 15, 16, 17, 18, 19, or chromosome 20 of Glycine canescens and further wherein said chromosomal interval comprises at least one allele that associates with the trait of increased disease resistance, wherein said allele is any one of the alleles depicted in Table 1. In particular embodiments, said chromosome interval or portion thereof is derived from chromosome 3 of Glycine canescens and comprises at least one allele associated with enhanced disease resistance to ASR as provided in Table 1. In another embodiment, an elite Glycine max plant is provided having introduced into its genome SEQ ID NO: 1, or a portion thereof, and exhibiting increased ASR resistance compared to a control plant not comprising SEQ ID NO: 1 or a portion in its genome.

[0025] All references listed below, as well as all references cited in the instant disclosure, including but not limited to all patents, patent applications and publications thereof, scientific journal articles, and database entries (e.g., GENBANK® database entries and all annotations available therein) are incorporated herein by reference in their entireties to the extent that they supplement, explain, provide a background for, or teach methodology, techniques, and/or compositions employed herein.

### Definitions

[0026] Unless defined otherwise, all technical and scientific terms used herein have the same meaning as commonly understood to one of ordinary skill in the art to which the presently disclosed subject matter belongs.

[0027] Although the following terms are believed to be well understood by one of ordinary skill in the art, the following definitions are set forth to facilitate understanding of the presently disclosed subject matter.

[0028] All references listed below, as well as all references cited in the instant disclosure, including but not limited to all patents, patent applications and publications thereof, scientific journal articles, and database entries (e.g., GENBANK® database entries and all annotations available therein) are incorporated herein by reference in their entireties to the extent that they supplement, explain, provide a background for, or teach methodology, techniques, and/or compositions employed herein.

[0029] Nucleotide sequences provided herein are presented in the 5′ to 3′ direction, from left to right and are presented using the standard code for representing nucleotide bases as set forth in 37 CFR §§ 1.821-1.825 and §§ 1.831-1.835 and the World Intellectual Property Organization (WIPO) Standard ST.25, for example: adenine (A), cytosine (C), thymine (T), and guanine (G).

[0030] Amino acids are likewise indicated using the WIPO Standard ST.25, for example: alanine (Ala; A), arginine (Arg; R), asparagine (Asn; N), aspartic acid (Asp; D), cysteine (Cys; C), glutamine (Gln; Q), glutamic acid (Glu; E), glycine (Gly; G), histidine (His; H), isoleucine (Ile; I), leucine (Leu; L), lysine (Lys; K), methionine (Met; M), phenylalanine (Phe; F), proline (Pro; P), serine (Ser; S), threonine (Thr; T), tryptophan (Trp; W), tyrosine (Tyr; Y), and valine (Val; V).

[0031] As used herein, the terms “a” or “an” or “the” may refer to one or more than one. For example, “a” marker can mean one marker or a plurality of markers.

[0032] As used herein, the term “and/or” refers to and encompasses all possible combinations of one or more of the associated listed items, as well as the lack of combinations when interpreted in the alternative (“or”).

[0033] As used herein, the term “about,” when used in reference to a measurable value such as an amount of mass, dose, time, temperature, and the like, is meant to encompass variations of 20%, 10%, 5%, 1%, 0.5%, or even 0.1% of the specified amount.

[0034] As used herein, a “coding sequence” or “CDS” is a nucleic acid sequence that is transcribed into RNA such as mRNA, rRNA, tRNA, snRNA, sense RNA or antisense RNA. In embodiments, the RNA is then translated to produce a protein. In example embodiments, the CDS is derived from a cDNA sequence and includes the sequence of spliced exons of a transcript in DNA notation and does not include any intron or 5′ or 3′-untranslated regions (UTRs). In other example embodiments, the CDS is derived from a genomic DNA sequence and includes the sequence of spliced exons of a transcript in DNA notation as well as one or more introns, and 5′ and/or 3′-untranslated regions (UTRs).

[0035] As used herein, a “codon optimized” nucleotide sequence means a nucleotide sequence of a recombinant, transgenic, or synthetic polynucleotide wherein the codons are chosen to reflect the particular codon bias that a host cell or organism may have. This is typically done in such a way as to preserve the amino acid sequence of the polypeptide encoded by the codon optimized nucleotide sequence. In certain embodiments, a nucleotide sequence is codon optimized for the cell (e.g., an animal, plant, fungal or bacterial cell) in which the construct is to be expressed. For example, a construct to be expressed in a plant cell can have all or parts of its sequence codon optimized for expression in a plant. See, for example, U.S. Pat. No. 6,121,014. In embodiments, the polynucleotides provided herein are codon-optimized for expression in a plant cell (e.g., a dicot cell, a monocot cell, a soybean cell) or bacterial cell.

[0036] The term “comprise”, “comprises” or “comprising,” when used in this specification, indicates the presence of the stated features, integers, steps, operations, elements, or components, but does not preclude the presence or addition of one or more other features, integers, steps, operations, elements, components, and/or groups thereof.

[0037] The term “consists essentially of” (and grammatical variants thereof), as applied to a polynucleotide sequence of this invention, means a polynucleotide sequence that consists of both the recited sequence (e.g., SEQ ID NO) and a total of ten or less (e.g., 1, 2, 3, 4, 5, 6, 7, 8, 9, or 10) additional nucleotides on the 5′ and/or 3′ ends of the recited sequence such that the function of the polynucleotide is not materially altered. The total of ten or less additional nucleotides includes the total number of additional nucleotides on both ends added together. The term “materially altered,” as applied to polynucleotides of the invention, refers to an increase or decrease in ability to express the polynucleotide sequence of at least about 50% or more as compared to the expression level of a polynucleotide sequence consisting of the recited sequence.

[0038] As used herein, the term “wild glycine” refers to a perennial Glycine plant, for example any one of G. canescens, G. argyrea, G. clandestine, G. latrobeana, G. albicans, G. aphyonota, G. arenaria, G. curvata, G. cyrtoloba, G. dolichocarpa, G. falcate, G. gracei, G. hirticaulis, G. lactovirens, G. latifolia, G. microphylla, G. montis-douglas, G. peratosa, G. pescadrensis, G. pindanica, G. pullenii, G. rubiginosa, G. stenophita, G. syndetika, or G. tomentella. In particular embodiments, “wild glycine” refers to a Glycine canescens plant. “PI446934” refers to Glycine canescens soybean accession numbers PI446934 respectively.

[0039] As used herein, the term “allele” refers to one of two or more different nucleotides or nucleotide sequences that occur at a specific locus. Example alleles that are associated with increased pathogen resistance are disclosed with reference to the markers of Table 1.

[0040] A marker is “associated with” a trait when it is linked to it and when the presence of the marker is an indicator of whether and/or to what extent the desired trait or trait form will occur in a plant/germplasm comprising the marker. Similarly, a marker is “associated with” an allele when it is linked to it and when the presence of the marker is an indicator of whether the allele is present in a plant/germplasm comprising the marker. For example, “a marker associated with enhanced pathogen resistance” refers to a marker whose presence or absence can be used to predict whether and/or to what extent a plant will display a pathogen resistant or disease resistant phenotype. In one example embodiment, a plant may be selected as having an allele in its genome that is introgressed from a wild glycine and that is associated with enhanced ASR resistance when any of the markers of Table 1 is identified in the plant genome.

[0041] A marker may be, but is not limited to, an allele, a gene, a haplotype, a restriction fragment length polymorphism (RFLP), a simple sequence repeat (SSR), random amplified polymorphic DNA (RAPD), cleaved amplified polymorphic sequences (CAPS) (Rafalski and Tingey, Trends in Genetics 9: 275 (1993)), an amplified fragment length polymorphism (AFLP) (Vos et al., Nucleic Acids Res. 23: 4407 (1995)), a single nucleotide polymorphism (SNP) (Brookes, Gene 234: 177 (1993)), a sequence-characterized amplified region (SCAR) (Paran and Michelmore, Theor. Appl. Genet. 85: 985 (1993)), a sequence-tagged site (STS) (Onozaki et al., Euphytica 138: 255 (2004)), a single-stranded conformation polymorphism (SSCP) (Orita et al., Proc. Natl. Acad. Sci. USA 86: 2766 (1989)), an inter-simple sequence repeat (ISSR) (Blair et al., Theor. Appl. Genet. 98: 780 (1999)), an inter-retrotransposon amplified polymorphism (IRAP), a retrotransposon-microsatellite amplified polymorphism (REMAP) (Kalendar et al., Theor. Appl. Genet. 98: 704 (1999)), a chromosome interval, or an RNA cleavage product (such as a Lynx tag). A marker may be present in genomic or expressed nucleic acids (e.g., ESTs). The term marker may also refer to nucleic acids used as probes or primers (e.g., primer pairs) for use in amplifying, hybridizing to and/or detecting nucleic acid molecules according to methods well known in the art (e.g., using PCR).

[0042] As used herein, the terms “backcross” and “backcrossing” refer to the process whereby a progeny plant is repeatedly crossed back to one of its parents. In a backcrossing scheme, the “donor” parent refers to the parental plant with the desired gene or locus to be introgressed. The “recipient” parent (used one or more times) or “recurrent” parent (used two or more times) refers to the parental plant into which the gene or locus is being introgressed. For example, see Ragot, M. et al. Marker-assisted Backcrossing: A Practical Example, in TECHNIQUES ET UTILISATIONS DES MARQUEURS MOLECULAIRES LES COLLOQUES, Vol. 72, pp. 45-56 (1995); and Openshaw et al., Marker-assisted Selection in Backcross Breeding, in PROCEEDINGS OF THE SYMPOSIUM “ANALYSIS OF MOLECULAR MARKER DATA,” pp. 41-43 (1994). The initial cross gives rise to the F1 generation. The term “BC1” refers to the second use of the recurrent parent, “BC2” refers to the third use of the recurrent parent, and so on.

[0043] A centimorgan (“cM”) is a unit of measure of recombination frequency. One cM is equal to a 1% chance that a marker at one genetic locus will be separated from a marker at a second locus due to crossing over in a single generation.

[0044] As used herein, the term “chromosomal interval defined by and including” used in reference to particular loci and/or alleles, refers to a chromosomal interval delimited by and encompassing the stated loci, alleles.

[0045] As used herein, the terms “cross” or “crossed” or “crossing” refer to the fusion of gametes via pollination to produce progeny (e.g., cells, seeds or plants). The term encompasses both sexual crosses (the cross pollination of one plant by another) and selfing (self-pollination, e.g., when the pollen and ovule are from the same plant).

[0046] As used herein, the terms “cultivar” and “variety” refer to a group of similar plants that by structural or genetic features and/or performance can be distinguished from other varieties within the same species.

[0047] As used herein, the terms “desired allele”, “favorable allele”, and “allele of interest” are used interchangeably to refer to an allele associated with a desired trait. In some embodiments, a “desired allele” and/or “allele of interest” may be associated with either an increase or a decrease of a feature of a given trait, depending on the nature of the desired phenotype. In some embodiments, a “desired allele” and/or “allele of interest” may be associated with a change in morphology, color, etc. In some embodiments, where the desired allele is associated with enhanced pathogen resistance, presence of the allele in a plant is associated with an increased resistance to a given pathogen relative to a control plant wherein the allele is absent.

[0048] As used herein, “disease resistance gene” or “resistance gene” or “R-gene” refers to a nucleic acid having a nucleotide sequence (e.g., DNA sequence) encoding a polypeptide, R-protein, or Resistance protein, that when expressed in a plant cell, is capable of enhancing or improving or increasing a defense or immune response in the plant cell, thereby conferring the plant with increased resistance to one or more plant pathogens. In specific embodiments, the chromosomal intervals of the present invention may comprise the sequence for a disease resistance gene, or R-gene, encoding a resistance protein, or R-protein, that confers enhanced pathogen resistance when expressed in a plant cell.

[0049] As used herein, the terms “disease tolerance”, “disease resistance”, “disease tolerant” or “disease resistant” refers to a plant's ability to endure and/or thrive despite being infected with a respective disease. Thus “disease tolerance” or “disease resistance” means a statistically significant decrease or the absence in one or more disease symptoms of a plant caused by a plant pathogen when compared to an appropriate control plant. In some embodiments, an increase in disease tolerance or resistance can be (1) measured by a plant's ability to endure and/or thrive despite being infected with a respective disease; (2) measured by infected disease resistant legume or soybean plants yielding as well as (or nearly as well) as uninfected legume or soybean plants; or (3) measured by a delay or the prevention of proliferation of a pathogen (e.g., fungi), including a delay or the prevention in disease related symptoms. In still other embodiments, a plant or germplasm can be labeled as “disease resistant” if it displays “enhanced or increased pathogen resistance” when compared to a control plant.

[0050] As used herein, the terms “enhanced pathogen resistance”, “enhanced disease resistance”, “increased resistance to a pathogen,” or “confers pathogen resistance” refers to an improvement, enhancement, or increase in a plant's ability to endure and/or thrive despite being infected with a pathogen or disease (e.g., Asian soybean rust) as compared to one or more control plants. In embodiments, enhanced disease resistance includes any mechanism (other than whole-plant immunity or resistance) that reduces the expression of symptoms indicative of infection for a given disease or pathogen, such as Asian soybean rust, soybean cyst nematode, Phytophthora, etc. Enhanced disease resistance includes a reduction in the symptoms indicative of infection for a disease such as Asian soybean rust (“ASR”). An enhanced plant pathogen resistance may comprise any statistically significant increase in resistance to the plant pathogen, including, for example, an increase of at least 1%, 5%, 10%, 20%, 30%, 40%, 50%, 60%, 70%, 80%, 90%, 100% or higher. Conferring or enhancing or increasing resistance may include a reduction (partial reduction or complete reduction) in symptoms or phenotypic characteristics associated with susceptibility to the pathogen and/or an increase in phenotypic characteristics associated with resistance to the pathogen. In example embodiments, conferring or increasing of resistance to Asian Soy Rust can include a statistically significant reduction in the number, size, and/or density of lesions, change in the color of lesions (such as from a tan coloration to a reddish-brown coloration), reduction in number and density of pustule formation, reduction in sporulation, reduction in defoliation, a reduction in yield loss, or any combination thereof. Further, enhanced pathogen resistance can include the prevention or delay of proliferation of a pathogen (e.g., fungus) in the plant.

[0051] A “control” or “control plant” or “control plant cell” provides a reference point for measuring changes in phenotype of the subject plant or plant cell. A control plant or plant cell may comprise, for example: (a) a wild-type plant or cell, i.e., of the same genotype as the starting material for the genetic alteration which resulted in the subject plant or cell; (b) a plant or plant cell of the same genotype as the starting material but which has been transformed with a null construct (i.e., with a construct which has no known effect on the trait of interest, such as a construct comprising a marker gene); (c) a plant or plant cell which is a non-transformed segregant among progeny of a subject plant or plant cell; (d) a plant or plant cell genetically identical to the subject plant or plant cell but which is not exposed to conditions or stimuli that would induce expression of the gene of interest; or (e) the subject plant or plant cell itself, under conditions in which the gene of interest is not expressed.

[0052] As used herein, the terms “elite” and “elite line” refer to any line that has resulted from breeding and selection for desirable agronomic performance. An elite line may be substantially homozygous. Numerous elite lines are available and known to those of skill in the art.

[0053] As used herein, the term “elite germplasm” refers to any germplasm that is derived from, or is capable of giving rise to, an elite plant.

[0054] As used herein, the terms “exotic,” “exotic line” and “exotic germplasm” refer to any plant, line or germplasm that is not elite. In general, exotic plants/germplasms are not derived from any known elite plant or germplasm, but rather are selected to introduce one or more desired genetic elements into a breeding program (e.g., to introduce novel alleles into a breeding program).

[0055] A “genetic map” is a description of genetic linkage relationships among loci on one or more chromosomes within a given species, generally depicted in a diagrammatic or tabular form. For each genetic map, distances between loci are measured by the recombination frequencies between them. Recombinations between loci can be detected using a variety of markers. A genetic map is a product of the mapping population, types of markers used, and the polymorphic potential of each marker between different populations. The order and genetic distances between loci can differ from one genetic map to another. In one non-limiting example, distances in a genetic map are indicated in centimorgan (cM) units.

[0056] When genetic map loci are represented in cM, position zero corresponds to the first (most distal) marker known at the beginning of the chromosome on both Syngenta's internal consensus genetic map and the Williams 82 v2.0 reference genome map, which is freely available to the public from the soybase(.)org website.

[0057] As used herein, the term “genotype” refers to the genetic constitution of an individual (or group of individuals) at one or more genetic loci, as contrasted with the observable and/or detectable and/or manifested trait (the phenotype). Genotype is defined by the allele(s) of one or more known loci that the individual has inherited from its parents. The term genotype can be used to refer to an individual's genetic constitution at a single locus, at multiple loci, or more generally, the term genotype can be used to refer to an individual's genetic make-up for all the genes in its genome. Genotypes can be indirectly characterized, e.g., using markers and/or directly characterized by nucleic acid sequencing.

[0058] As used herein, the term “germplasm” refers to genetic material of or from an individual (e.g., a plant), a group of individuals (e.g., a plant line, variety or family), or a clone derived from a line, variety, species, or culture. The germplasm can be part of an organism or cell or can be separate from the organism or cell. In general, germplasm provides genetic material with a specific molecular makeup that provides a physical foundation for some or all of the hereditary qualities of an organism or cell culture. As used herein, germplasm may refer to seeds, cells (including protoplasts and calli) or tissues from which new plants may be grown, as well as plant parts that can be cultured into a whole plant (e.g., stems, buds, roots, leaves, etc.).

[0059] A “haplotype” is the genotype of an individual at a plurality of genetic loci, i.e., a combination of alleles. Typically, the genetic loci that define a haplotype are physically and genetically linked, i.e., on the same chromosome segment. The term “haplotype” can refer to polymorphisms at a particular locus, such as a single marker locus, or polymorphisms at multiple loci along a chromosomal segment.

[0060] As used herein, the term “heterozygous” refers to a genetic status wherein different alleles reside at corresponding loci on homologous chromosomes.

[0061] As used herein, the term “homozygous” refers to a genetic status wherein identical alleles reside at corresponding loci on homologous chromosomes.

[0062] As used herein, the term “hybrid” refers to a seed and/or plant produced when at least two genetically dissimilar parents are crossed.

[0063] As used herein, the term “inbred” refers to a substantially homozygous plant or variety. The term may refer to a plant or variety that is substantially homozygous throughout the entire genome or that is substantially homozygous with respect to a portion of the genome that is of particular interest.

[0064] As used herein, the term “indel” refers to an insertion or deletion in a pair of nucleotide sequences, wherein a first sequence may be referred to as having an insertion relative to a second sequence or the second sequence may be referred to as having a deletion relative to the first sequence.

[0065] As used herein, the terms “introgression,” “introgressing” and “introgressed” refer to both the natural and artificial transmission of a desired allele or combination of desired alleles of a genetic locus or genetic loci from one genetic background to another. For example, a desired allele at a specified locus can be transmitted to at least one progeny via a sexual cross between two parents of the same species, where at least one of the parents has the desired allele in its genome. Alternatively, for example, transmission of an allele can occur by recombination between two donor genomes, e.g., in a fused protoplast, where at least one of the donor protoplasts has the desired allele in its genome. The desired allele may be a selected allele of a marker, a QTL, a transgene, or the like. Offspring comprising the desired allele can be repeatedly backcrossed to a line having a desired genetic background and selected for the desired allele, with the result being that the desired allele becomes fixed in the desired genetic background. For example, a marker associated with enhanced ASR tolerance may be introgressed from a donor into a recurrent parent that is not Disease resistant. The resulting offspring could then be repeatedly backcrossed and selected until the progeny possess the ASR tolerance allele(s) in the recurrent parent background.

[0066] As used herein, the term “linkage” refers to the degree with which one marker locus is associated with another marker locus or some other locus (for example, an ASR tolerance locus). The linkage relationship between a molecular marker and a phenotype may be given as a “probability” or “adjusted probability.” Linkage can be expressed as a desired limit or range. For example, in some embodiments, any marker is linked (genetically and physically) to any other marker when the markers are separated by less than about 50, 40, 30, 25, 20, or 15 map units (or cM).

[0067] In some aspects of the present invention, it is advantageous to define a bracketed range of linkage, for example, from about 10 cM and about 20 cM, from about 10 cM and about 30 cM, or from about 10 cM and about 40 cM. The more closely a marker is linked to a second locus, the better an indicator for the second locus that marker becomes. Thus, “closely linked loci” such as a marker locus and a second locus display an inter-locus recombination frequency of about 10%, 9%, 8%, 7%, 6%, 5%, 4%, 3%, or 2% or less. In some embodiments, the relevant loci display a recombination frequency of about 1% or less, e.g., about 0.75%, 0.5%, 0.25% or less. Two loci that are localized to the same chromosome, and at such a distance that recombination between the two loci occurs at a frequency of less than about 10% (e.g., about 9%, 8%, 7%, 6%, 5%, 4%, 3%, 2%, 1%, 0.75%, 0.5%, or 0.25%, or less) may also be said to be “proximal to” each other. Since one cM is the distance between two markers that show a 1% recombination frequency, any marker is closely linked (genetically and physically) to any other marker that is in close proximity, e.g., at or less than about 10 cM distant. Two closely linked markers on the same chromosome may be positioned about 9, 8, 7, 6, 5, 4, 3, 2, 1, 0.75, 0.5 or 0.25 cM or less from each other.

[0068] As used herein, the term “linkage disequilibrium” refers to a non-random segregation of genetic loci or traits (or both). In either case, linkage disequilibrium implies that the relevant loci are within sufficient physical proximity along a length of a chromosome so that they segregate together with greater than random (i.e., non-random) frequency (in the case of co-segregating traits, the loci that underlie the traits are in sufficient proximity to each other). Markers that show linkage disequilibrium are considered linked. Linked loci co-segregate more than 50% of the time, e.g., from about 51% to about 100% of the time. In other words, two markers that co-segregate have a recombination frequency of less than 50% (and, by definition, are separated by less than 50 cM on the same chromosome). As used herein, linkage can be between two markers, or alternatively between a marker and a phenotype. A marker locus can be “associated with” (linked to) a trait, e.g., Asian Soybean Rust (herein ‘ASR’). The degree of linkage of a molecular marker to a phenotypic trait is measured, e.g., as a statistical probability of co-segregation of that molecular marker with the phenotype.

[0069] Linkage disequilibrium is most commonly assessed using the measure r², which is calculated using the formula described by Hill and Robertson, Theor. Appl. Genet. 38:226 (1968). When r²=1, complete linkage disequilibrium exists between the two marker loci, meaning that the markers have not been separated by recombination and have the same allele frequency. Values for r² above ⅓ indicate sufficiently strong linkage disequilibrium to be useful for mapping. Ardlie et al., Nature Reviews Genetics 3:299 (2002). Hence, alleles are in linkage disequilibrium when r² values between pairwise marker loci are greater than or equal to about 0.33, 0.4, 0.5, 0.6, 0.7, 0.8, 0.9, or 1.0.

[0070] As used herein, the term “linkage equilibrium” describes a situation where two markers independently segregate, i.e., sort among progeny randomly. Markers that show linkage equilibrium are considered unlinked (whether or not they lie on the same chromosome).

[0071] A “locus” is a position on a chromosome where a gene or marker or allele is located. In some embodiments, a locus may encompass one or more nucleotides.

[0072] As used herein, the terms “marker” and “genetic marker” are used interchangeably to refer to a nucleotide and/or a nucleotide sequence that has been associated with a phenotype, trait or trait form. In some embodiments, a marker may be associated with an allele or alleles of interest and may be indicative of the presence or absence of the allele or alleles of interest in a cell or organism. A marker may be, but is not limited to, an allele, a gene, a haplotype, a restriction fragment length polymorphism (RFLP), a simple sequence repeat (SSR), random amplified polymorphic DNA (RAPD), cleaved amplified polymorphic sequences (CAPS) (Rafalski and Tingey, Trends in Genetics 9:275 (1993)), an amplified fragment length polymorphism (AFLP) (Vos et al., Nucleic Acids Res. 23:4407 (1995)), a single nucleotide polymorphism (SNP) (Brookes, Gene 234:177 (1993)), a sequence-characterized amplified region (SCAR) (Paran and Michelmore, Theor. Appl. Genet. 85:985 (1993)), a sequence-tagged site (STS) (Onozaki et al., Euphytica 138:255 (2004)), a single-stranded conformation polymorphism (SSCP) (Orita et al., Proc. Natl. Acad. Sci. USA 86:2766 (1989)), an inter-simple sequence repeat (ISSR) (Blair et al., Theor. Appl. Genet. 98:780 (1999)), an inter-retrotransposon amplified polymorphism (IRAP), a retrotransposon-microsatellite amplified polymorphism (REMAP) (Kalendar et al., Theor. Appl. Genet. 98:704 (1999)), a chromosome interval, or an RNA cleavage product (such as a Lynx tag). A marker may be present in genomic or expressed nucleic acids (e.g., ESTs). The term marker may also refer to nucleic acids used as probes or primers (e.g., primer pairs) for use in amplifying, hybridizing to and/or detecting nucleic acid molecules according to methods well known in the art. A large number of soybean molecular markers are known in the art, and are published or available from various sources, such as the SoyBase internet resource.

[0073] Markers corresponding to genetic polymorphisms between members of a population can be detected by methods well-established in the art. These include, e.g., nucleic acid sequencing, hybridization methods, amplification methods (e.g., PCR-based sequence specific amplification methods), detection of restriction fragment length polymorphisms (RFLP), detection of isozyme markers, detection of polynucleotide polymorphisms by allele specific hybridization (ASH), detection of amplified variable sequences of the plant genome, detection of self-sustained sequence replication, detection of simple sequence repeats (SSRs), detection of single nucleotide polymorphisms (SNPs), and/or detection of amplified fragment length polymorphisms (AFLPs). Well established methods are also known for the detection of expressed sequence tags (ESTs) and SSR markers derived from EST sequences and randomly amplified polymorphic DNA (RAPD).

[0074] A “marker allele,” also described as an “allele of a marker locus,” can refer to one of a plurality of polymorphic nucleotide sequences found at a marker locus in a population that is polymorphic for the marker locus.

[0075] “Marker-assisted selection” (MAS) is a process by which phenotypes are selected based on marker genotypes. In some embodiments, marker genotypes are used to identify plants that will be selected for a breeding program or for planting. In some embodiments, marker genotypes are used to identify plants that will not be selected for a breeding program or for planting (i.e., counter-selected plants), allowing them to be removed from the breeding/planting population.

[0076] As used herein, the terms “marker locus” and “marker loci” refer to a specific chromosome location or locations in the genome of an organism where a specific marker or markers can be found. A marker locus can be used to track the presence of a second linked locus, e.g., a linked locus that encodes or contributes to expression of a phenotypic trait. For example, a marker locus can be used to monitor segregation of alleles at a locus, such as a QTL or single gene, that are genetically or physically linked to the marker locus.

[0077] As used herein, the terms “marker probe” and “probe” refer to a nucleotide sequence or nucleic acid molecule that can be used to detect the presence of one or more particular alleles within a marker locus (e.g., a nucleic acid probe that is complementary to all of or a portion of the marker or marker locus, through nucleic acid hybridization). Marker probes comprising about 8, 10, 15, 20, 30, 40, 50, 60, 70, 80, 90, 100 or more contiguous nucleotides may be used for nucleic acid hybridization. Alternatively, in some aspects, a marker probe refers to a probe of any type that is able to distinguish (i.e., genotype) the particular allele that is present at a marker locus.

[0078] As used herein, the terms “molecular marker” or “genetic marker” may be used to refer to a genetic marker, as defined above, or an encoded product thereof (e.g., a protein) used as a point of reference when identifying a linked locus. A molecular marker can be derived from genomic nucleotide sequences or from expressed nucleotide sequences (e.g., from a spliced RNA, a cDNA, etc.). The term also refers to nucleotide sequences complementary to or flanking the marker sequences, such as nucleotide sequences used as probes and/or primers capable of amplifying the marker sequence. Nucleotide sequences are “complementary” when they specifically hybridize in solution, e.g., according to Watson-Crick base pairing rules. Some of the markers described herein are also referred to as hybridization markers when located on an indel region. This is because the insertion region is, by definition, a polymorphism vis-ã-vis a plant without the insertion. Thus, the marker need only indicate whether the indel region is present or absent. Any suitable marker detection technology may be used to identify such a hybridization marker, e.g., SNP technology is used in the examples provided herein.

[0079] A “non-naturally occurring variety of soybean” is any variety of soybean that does not naturally exist in nature. A “non-naturally occurring variety of soybean” may be produced by any method known in the art, including, but not limited to, transforming a soybean plant or germplasm, transfecting a soybean plant or germplasm and crossing a naturally occurring variety of soybean with a non-naturally occurring variety of soybean. In some embodiments, a “non-naturally occurring variety of soybean” may comprise one of more heterologous nucleotide sequences. In some embodiments, a “non-naturally occurring variety of soybean” may comprise one or more non-naturally occurring copies of a naturally occurring nucleotide sequence (i.e., extraneous copies of a gene that naturally occurs in soybean). In some embodiments, a “non-naturally occurring variety of soybean” may comprise a non-natural combination of two or more naturally occurring nucleotide sequences (i.e., two or more naturally occurring genes that do not naturally occur in the same soybean, for instance genes not found in Glycine max lines).

[0080] As used herein, the terms “phenotype,” “phenotypic trait” or “trait” refer to one or more traits and/or manifestations of an organism. The phenotype can be a manifestation that is observable to the naked eye, or by any other means of evaluation known in the art, e.g., microscopy, biochemical analysis, or an electromechanical assay. In some cases, a phenotype or trait is directly controlled by a single gene or genetic locus, i.e., a “single gene trait.” in other cases, a phenotype or trait is the result of several genes. it is noted that, as used herein, the term “disease resistant phenotype” takes into account environmental conditions that might affect the respective disease such that the effect is real and reproducible.

[0081] As used herein, the term “plant” may refer to a whole plant, any part thereof, or a cell or tissue culture derived from a plant. Thus, the term “plant” can refer to any of: whole plants, plant components or organs (e.g., roots, stems, leaves, buds, flowers, pods, etc.), plant tissues, seeds and/or plant cells. A plant cell is a cell of a plant, taken from a plant, or derived through culture from a cell taken from a plant. Thus, the term “soybean plant” may refer to a whole soybean plant, one or more parts of a soybean plant (e.g., roots, root tips, stems, leaves, buds, flowers, pods, seeds, cotyledons, etc.), soybean plant cells, soybean plant protoplasts and/or soybean plant calli.

[0082] As used herein, the term “polymorphism” refers to a variation in the nucleotide sequence at a locus, where said variation is too common to be due merely to a spontaneous mutation. A polymorphism can be a single nucleotide polymorphism (SNP) or an insertion/deletion polymorphism, also referred to herein as an “indel.” Additionally, the variation can be in a transcriptional profile or a methylation pattern. The polymorphic site or sites of a nucleotide sequence can be determined by comparing the nucleotide sequences at one or more loci in two or more germplasm entries.

[0083] As used herein, the term “population” refers to a genetically heterogeneous collection of plants sharing a common genetic derivation.

[0084] As used herein, the terms “progeny” and “progeny plant” refer to a plant generated from a vegetative or sexual reproduction from one or more parent plants. A progeny plant may be obtained by cloning or selfing a single parent plant, or by crossing two parental plants.

[0085] As used herein, the term “reference sequence” refers to a defined nucleotide sequence used as a basis for nucleotide sequence comparison. The reference sequence for a marker, for example, is obtained by genotyping a number of lines at the locus or loci of interest, aligning the nucleotide sequences in a sequence alignment program, and then obtaining the consensus sequence of the alignment. Hence, a reference sequence identifies the polymorphisms in alleles at a locus. A reference sequence may not be a copy of an actual nucleic acid sequence from any particular organism; however, it is useful for designing primers and probes for actual polymorphisms in the locus or loci.

[0086] As used herein, the terms “disease tolerance” and “Disease resistant” refer to a plant's ability to endure and/or thrive despite being infected with a respective disease. When used in reference to germplasm, the terms refer to the ability of a plant that arises from that germplasm to endure and/or thrive despite being infected with a respective disease. In some embodiments, infected Disease resistant soybean plants may yield as well (or nearly as well) as uninfected soybean plants. In general, a plant or germplasm is labeled as “Disease resistant” if it displays “enhanced pathogen resistance.”

[0087] As used herein, the terms “enhanced pathogen resistance”, “enhanced disease resistance”, and “conferring or enhancing resistance to a pathogen” refers to an improvement, enhancement, or increase in a plant's ability to endure and/or thrive despite being infected with a pathogen or disease (e.g., Asian soybean rust) as compared to one or more control plants (e.g., one or both of the parents, or a plant lacking the chromosomal interval or marker associated with enhanced pathogen resistance to respective pathogen/disease). The control plants may be fully susceptible to the pathogen or have limited resistance to the pathogen. Enhanced disease resistance includes any mechanism (other than whole-plant immunity or resistance) that reduces the expression of symptoms indicative of infection for a respective disease such as Asian soybean rust, soybean cyst nematode, Phytophthora, etc. Conferring or enhancing of resistance may include a reduction (partial reduction or complete reduction) in symptoms or phenotypic characteristics associated with susceptibility to the pathogen and/or an increase in phenotypic characteristics associated with resistance to the pathogen. In example embodiments, conferring or increasing of resistance to Asian Soy Rust can include a reduction in the number, size, and/or density of lesions, change in the color of lesions (such as from a tan coloration to a reddish-brown coloration), reduction in number and density of pustule formation, reduction in sporulation, or any combination thereof.

[0088] In embodiments, the chromosomal interval of the present invention can be used to enhance pathogen resistance to a fungal pathogen and/or a nematode. As non-limiting examples, the chromosomal interval of the present invention can be used to enhance resistance to: soy cyst nematode, bacterial pustule, root knot nematode, frog eye leaf spot, phytopthora, brown stem rot, nematode, Asian Soybean Rust, smut, Golovinomyces cichoracearum, Erysiphe cichoracearum, Blumeria graminis, Podosphaera xanthii, Sphaerotheca fuliginea, Pythium ultimum, Uncinula necator, Mycosphaerella pinodes, Magnaporthe grisea, Bipolaris oryzae, Magnaporthe grisea, Rhizoctonia solani, Phytophthora sojae, Schizaphis graminum, Bemisia tabaci, Rhopalosiphum maidis, Deroceras reticulatum, Diatraea saccharalis, Schizaphis graminum, Myzus persicae, Sclerotinia sclerotiorum, Macrophomina phaseolina, or Fusarium virguliforme.

[0089] A “favorable allele” of a marker is a marker allele that segregates with the favorable plant phenotype, therefore providing the benefit of identifying plants that can be selected for a breeding program or planting. In example embodiments, as used herein, a favorable allele of a marker is a marker allele that segregates with the pathogen resistant phenotype of a plant.

[0090] An “unfavorable allele” of a marker is a marker allele that segregates with the unfavorable plant phenotype, therefore providing the benefit of identifying plants that can be removed from a breeding program or planting.

[0091] Table 1 indicates single nucleotide polymorphisms (SNPs) within SEQ ID NO: 1 that associate with ASR resistance. All alleles for the SNPs identified in Table 1 were determined to be significantly linked with resistance or susceptibility (p<0.05).

TABLE 1
SNP MARKERS WITHIN SEQ ID NO: 1 THAT ARE ASSOCIATED
WITH INCREASED RESISTANCE TO ASR

| | Position | | |
|---|---|---|---|
| | within SEQ ID | Favorable Allele | Unfavorable Allele |
| SNP ID NO. | NO: 1 | (Rust Resistant) | (Rust Susceptible) |
| 1850 | 152261 | G | C |
| 1851 | 152266 | G | A |
| 1852 | 152548 | C | T |
| 1853 | 152555 | C | T |
| 1854 | 152694 | G | A |
| 1855 | 152803 | C | A |
| 1856 | 152839 | T | C |
| 1857 | 152915 | A | C |
| 1858 | 152959 | A | T |
| 1859 | 153137 | A | G |
| 1860 | 154053 | C | T |
| 1861 | 154140 | A | G |
| 1862 | 154285 | C | G |
| 1863 | 154389 | T | C |
| 1864 | 154394 | G | T |
| 1865 | 154520 | C | T |
| 1866 | 154639 | T | C |
| 1867 | 154726 | T | C |
| 1868 | 154855 | T | C |
| 1869 | 154865 | G | A |
| 1870 | 154910 | G | A |
| 1871 | 154940 | T | G |
| 1872 | 155612 | G | T |
| 1873 | 156107 | G | A |
| 1874 | 156134 | T | C |
| 1875 | 156661 | G | A |
| 1876 | 156702 | A | G |
| 1877 | 157081 | A | T |
| 1878 | 157176 | T | C |
| 1879 | 157221 | G | A |
| 1880 | 157351 | G | T |
| 1881 | 157806 | G | T |
| 1882 | 157822 | T | C |
| 1883 | 157976 | A | G |
| 1884 | 158345 | C | T |
| 1885 | 158380 | C | T |
| 1886 | 159057 | G | A |
| 1887 | 159101 | G | C |
| 1888 | 159141 | G | T |
| 1889 | 159157 | T | A |
| 1890 | 159159 | A | G |
| 1891 | 159234 | A | G |
| 1892 | 159247 | G | T |
| 1893 | 160231 | T | G |
| 1894 | 160318 | C | A |
| 1895 | 160413 | T | C |
| 1896 | 160493 | C | T |
| 1897 | 160557 | A | T |
| 1898 | 160568 | G | A |
| 1899 | 160863 | A | C |
| 1900 | 160949 | T | C |
| 1901 | 161299 | T | A |
| 1902 | 161769 | T | A |
| 1903 | 162372 | A | C |
| 1904 | 162401 | G | A |
| 1905 | 162600 | A | T |
| 1906 | 162625 | A | G |
| 1907 | 163062 | T | C |
| 1908 | 163194 | T | A |
| 1909 | 163395 | G | A |
| 1910 | 163469 | T | C |
| 1911 | 163516 | A | G |
| 1912 | 163629 | G | C |
| 1913 | 163681 | G | A |
| 1914 | 163718 | C | G |
| 1915 | 163720 | A | C |
| 1916 | 163781 | C | T |
| 1917 | 163806 | G | A |
| 1918 | 163841 | A | G |
| 1919 | 163856 | T | G |
| 1920 | 163906 | A | T |
| 1921 | 163907 | C | A |
| 1922 | 163978 | C | T |
| 1923 | 164094 | A | G |
| 1924 | 164128 | A | T |
| 1925 | 164249 | G | C |
| 1926 | 164281 | T | G |
| 1927 | 164313 | A | C |
| 1928 | 164340 | T | C |
| 1929 | 164354 | T | G |
| 1930 | 164424 | C | A |
| 1931 | 164511 | C | A |
| 1932 | 164634 | T | C |
| 1933 | 164824 | G | A |
| 1934 | 164891 | C | T |
| 1935 | 164964 | G | A |
| 1936 | 165079 | A | G |
| 1937 | 165144 | G | A |
| 1938 | 165200 | A | G |
| 1939 | 165246 | T | C |
| 1940 | 165365 | C | T |
| 1941 | 165375 | C | T |
| 1942 | 165388 | T | C |
| 1943 | 165414 | T | G |
| 1944 | 165439 | T | C |
| 1945 | 165491 | C | T |
| 1946 | 165495 | A | G |
| 1947 | 165543 | A | T |
| 1948 | 165566 | T | C |
| 1949 | 165628 | A | C |
| 1950 | 165686 | C | T |
| 1951 | 165693 | G | A |
| 1952 | 165702 | G | A |
| 1953 | 165783 | T | C |
| 1954 | 165793 | G | C |
| 1955 | 165810 | T | C |
| 1956 | 165811 | G | A |
| 1957 | 165886 | G | T |
| 1958 | 165897 | T | C |
| 1959 | 165928 | G | T |
| 1960 | 166100 | T | C |
| 1961 | 166101 | T | C |
| 1962 | 166199 | A | C |
| 1963 | 166278 | T | C |
| 1964 | 166346 | A | G |
| 1965 | 166377 | C | T |
| 1966 | 166401 | A | G |
| 1967 | 166437 | G | A |
| 1968 | 166549 | G | A |
| 1969 | 166576 | A | T |
| 1970 | 166577 | A | G |
| 1971 | 166580 | T | C |
| 1972 | 166612 | A | G |
| 1973 | 166681 | A | T |
| 1974 | 166682 | A | T |
| 1975 | 166683 | A | T |
| 1976 | 166737 | A | T |
| 1977 | 166749 | T | A |
| 1978 | 166924 | A | T |
| 1979 | 166964 | T | G |
| 1980 | 167001 | T | A |
| 1981 | 167016 | T | G |
| 1982 | 167170 | T | A |
| 1983 | 167212 | A | G |
| 1984 | 167327 | C | G |
| 1985 | 167563 | C | T |
| 1986 | 167822 | A | T |
| 1987 | 167881 | C | T |
| 1988 | 167954 | — | T |
| 1989 | 167987 | G | A |
| 1990 | 168026 | A | G |
| 1991 | 168295 | C | T |
| 1992 | 168474 | A | G |
| 1993 | 168569 | C | T |
| 1994 | 168595 | T | G |
| 1995 | 168605 | G | A |
| 1996 | 168666 | C | T |
| 1997 | 168722 | T | A |
| 1998 | 168752 | G | A |
| 1999 | 168878 | T | C |
| 2000 | 168908 | C | T |
| 2001 | 168931 | G | A |
| 2002 | 168938 | T | C |
| 2003 | 168946 | G | A |
| 2004 | 168974 | T | A |
| 2005 | 169097 | G | C |
| 2006 | 169284 | G | A |
| 2007 | 169540 | G | A |
| 2008 | 169784 | T | C |
| 2009 | 170568 | T | C |
| 2010 | 170779 | — | TAAT |
| 2011 | 170809 | A | G |
| 2012 | 170859 | T | G |
| 2013 | 170920 | A | C |
| 2014 | 170961 | C | A |
| 2015 | 171107 | C | A |
| 2016 | 171156 | C | T |
| 2017 | 171180 | A | G |
| 2018 | 171194 | G | A |
| 2019 | 171198 | C | T |
| 2020 | 171202 | A | T |
| 2021 | 171229 | T | A |
| 2022 | 171296 | G | T |
| 2023 | 171344 | C | T |
| 2024 | 171378 | G | C |
| 2025 | 171389 | A | T |
| 2026 | 171401 | G | A |
| 2027 | 171474 | C | T |
| 2028 | 171482 | G | T |
| 2029 | 171487 | T | C |
| 2030 | 171563 | G | A |
| 2031 | 171572 | C | T |
| 2032 | 171575 | T | C |
| 2033 | 171616 | A | C |
| 2034 | 171630 | A | G |
| 2035 | 171802 | A | C |
| 2036 | 171827 | C | T |
| 2037 | 171832 | T | G |
| 2038 | 171847 | C | T |
| 2039 | 171879 | A | C |
| 2040 | 171941 | G | A |
| 2041 | 171982 | T | C |
| 2042 | 172001 | T | G |
| 2043 | 172173 | A | C |
| 2044 | 172258 | C | T |
| 2045 | 172371 | — | AAC |
| 2046 | 172391 | G | T |
| 2047 | 172453 | T | C |
| 2048 | 172506 | C | T |
| 2049 | 172557 | G | A |
| 2050 | 172567 | G | A |
| 2051 | 172599 | C | A |
| 2052 | 172635 | G | A |
| 2053 | 172639 | G | A |
| 2054 | 172655 | G | T |
| 2055 | 172672 | C | T |
| 2056 | 172731 | A | T |
| 2057 | 172732 | G | T |
| 2058 | 172742 | C | T |
| 2059 | 172743 | A | G |
| 2060 | 172801 | C | T |
| 2061 | 172822 | A | G |
| 2062 | 172847 | G | A |
| 2063 | 172894 | C | A |
| 2064 | 172920 | C | T |
| 2065 | 172950 | A | G |
| 2066 | 173012 | A | G |
| 2067 | 173068 | A | G |
| 2068 | 173075 | A | G |
| 2069 | 173076 | G | T |
| 2070 | 173224 | A | T |
| 2071 | 173331 | C | T |
| 2072 | 173335 | A | G |
| 2073 | 173394 | C | T |
| 2074 | 173428 | T | C |
| 2075 | 173432 | — | T |
| 2076 | 173545 | A | T |
| 2077 | 173693 | T | C |
| 2078 | 173723 | T | G |
| 2079 | 173766 | C | T |
| 2080 | 173945 | T | G |
| 2081 | 174061 | A | T |
| 2082 | 174262 | C | A |
| 2083 | 174534 | C | T |
| 2084 | 174538 | A | C |
| 2085 | 174618 | G | A |
| 2086 | 174626 | G | T |
| 2087 | 174665 | T | A |
| 2088 | 174838 | A | C |
| 2089 | 174907 | C | T |
| 2090 | 179196 | T | C |
| 2091 | 179606 | T | C |
| 2092 | 179703 | A | C |
| 2093 | 180763 | C | T |
| 2094 | 180879 | A | C |
| 2095 | 180934 | A | G |
| 2096 | 180944 | A | G |
| 2097 | 181068 | A | G |
| 2098 | 181193 | T | C |
| 2099 | 181402 | T | G |
| 2100 | 181628 | T | C |
| 2101 | 181680 | C | T |
| 2102 | 181733 | A | G |
| 2103 | 181755 | T | G |
| 2104 | 182699 | T | C |
| 2105 | 182702 | T | C |
| 2106 | 182714 | A | G |
| 2107 | 182811 | A | G |
| 2108 | 183078 | T | C |
| 2109 | 183139 | C | T |
| 2110 | 183151 | C | T |
| 2111 | 183446 | T | A |
| 2112 | 183489 | T | C |
| 2113 | 183698 | T | C |
| 2114 | 183713 | G | T |
| 2115 | 183721 | A | G |
| 2116 | 184257 | A | T |
| 2117 | 184302 | A | G |
| 2118 | 184573 | C | A |
| 2119 | 184895 | T | C |
| 2120 | 185013 | C | T |
| 2121 | 185139 | C | T |
| 2122 | 185446 | C | T |
| 2123 | 185525 | A | G |
| 2124 | 185565 | G | C |
| 2125 | 185580 | A | G |
| 2126 | 185617 | A | C |
| 2127 | 185635 | A | T |
| 2128 | 185809 | T | C |
| 2129 | 185969 | T | C |
| 2130 | 186041 | T | C |
| 2131 | 186063 | T | C |
| 2132 | 186064 | A | G |
| 2133 | 186069 | C | G |
| 2134 | 186100 | T | C |
| 2135 | 186173 | T | C |
| 2136 | 186633 | T | C |
| 2137 | 186757 | G | A |
| 2138 | 186847 | A | G |
| 2139 | 186980 | A | G |
| 2140 | 187136 | T | C |
| 2141 | 187157 | A | G |
| 2142 | 187170 | A | G |
| 2143 | 187185 | A | C |
| 2144 | 187312 | T | C |
| 2145 | 187489 | T | C |
| 2146 | 187997 | A | G |
| 2147 | 188101 | C | T |
| 2148 | 188247 | A | G |
| 2149 | 188300 | C | T |
| 2150 | 188422 | A | T |
| 2151 | 189186 | T | C |
| 2152 | 189223 | T | A |
| 2153 | 189591 | T | C |
| 2154 | 190003 | T | C |
| 2155 | 190080 | T | C |
| 2156 | 190127 | A | G |
| 2157 | 190689 | C | T |
| 2158 | 190737 | G | A |
| 2159 | 190819 | T | C |
| 2160 | 190827 | A | C |
| 2161 | 190840 | A | G |
| 2162 | 190851 | C | A |
| 2163 | 190882 | A | C |
| 2164 | 190932 | G | A |
| 2165 | 190947 | G | A |
| 2166 | 191037 | G | A |
| 2167 | 191135 | C | T |
| 2168 | 191195 | T | C |
| 2169 | 191231 | A | G |
| 2170 | 191276 | A | G |
| 2171 | 191312 | G | C |
| 2172 | 191371 | T | C |
| 2173 | 191439 | T | C |
| 2174 | 191474 | T | G |
| 2175 | 191506 | T | C |
| 2176 | 191595 | A | T |
| 2177 | 191631 | A | G |
| 2178 | 191648 | A | C |
| 2179 | 191762 | T | C |
| 2180 | 191853 | T | C |
| 2181 | 191945 | G | A |
| 2182 | 192012 | A | G |
| 2183 | 192037 | T | A |
| 2184 | 192076 | C | T |
| 2185 | 192155 | C | A |
| 2186 | 192211 | C | A |
| 2187 | 192212 | G | A |
| 2188 | 192218 | T | C |
| 2189 | 192349 | T | G |
| 2190 | 192453 | A | C |
| 2191 | 192455 | A | G |
| 2192 | 192537 | C | T |
| 2193 | 192579 | A | C |
| 2194 | 192633 | C | T |
| 2195 | 192664 | G | A |
| 2196 | 192697 | G | A |
| 2197 | 192702 | C | G |
| 2198 | 192813 | G | C |
| 2199 | 192870 | A | G |
| 2200 | 192884 | A | C |
| 2201 | 192951 | T | C |
| 2202 | 192980 | T | G |
| 2203 | 193281 | G | A |
| 2204 | 193327 | T | C |
| 2205 | 193345 | A | G |
| 2206 | 193450 | T | C |
| 2207 | 193451 | G | A |
| 2208 | 193675 | T | C |
| 2209 | 193736 | A | C |
| 2210 | 193779 | T | C |
| 2211 | 193806 | C | T |
| 2212 | 193897 | C | T |
| 2213 | 193901 | A | G |
| 2214 | 193956 | G | A |
| 2215 | 194015 | T | G |
| 2216 | 194041 | T | G |
| 2217 | 194078 | T | C |
| 2218 | 194105 | A | G |
| 2219 | 194185 | A | G |
| 2220 | 194191 | T | C |
| 2221 | 194218 | G | A |
| 2222 | 194342 | T | G |
| 2223 | 194381 | C | T |
| 2224 | 194506 | C | T |
| 2225 | 194534 | C | T |
| 2226 | 194629 | G | A |
| 2227 | 194640 | A | G |
| 2228 | 194645 | A | C |
| 2229 | 194676 | G | A |
| 2230 | 194683 | T | C |
| 2231 | 194734 | A | G |
| 2232 | 194831 | T | C |
| 2233 | 194986 | T | C |
| 2234 | 194993 | C | A |
| 2235 | 195046 | — | C |
| 2236 | 195081 | A | C |
| 2237 | 195100 | T | C |
| 2238 | 195115 | T | C |
| 2239 | 195181 | A | G |
| 2240 | 195192 | A | G |
| 2241 | 195225 | A | G |
| 2242 | 195240 | T | C |
| 2243 | 195279 | G | A |
| 2244 | 195332 | T | C |
| 2245 | 195353 | T | C |
| 2246 | 195361 | T | C |
| 2247 | 195421 | C | T |
| 2248 | 195494 | T | C |
| 2249 | 195529 | T | C |
| 2250 | 195602 | T | C |
| 2251 | 195690 | C | T |
| 2252 | 195728 | T | C |
| 2253 | 195738 | G | A |
| 2254 | 195801 | C | T |
| 2255 | 195900 | T | A |
| 2256 | 195922 | C | T |
| 2257 | 195924 | C | T |
| 2258 | 196258 | A | G |
| 2259 | 196335 | T | A |
| 2260 | 196383 | T | C |
| 2261 | 196438 | G | A |
| 2262 | 196605 | G | A |
| 2263 | 196621 | C | T |
| 2264 | 196649 | T | C |
| 2265 | 196786 | A | G |
| 2266 | 196857 | C | T |
| 2267 | 196883 | G | T |
| 2268 | 196894 | T | C |
| 2269 | 196920 | T | C |
| 2270 | 196932 | A | G |
| 2271 | 196936 | A | C |
| 2272 | 196970 | A | G |
| 2273 | 196971 | T | C |
| 2274 | 196972 | C | T |
| 2275 | 197049 | C | T |
| 2276 | 197059 | T | G |
| 2277 | 197103 | A | G |
| 2278 | 197108 | G | A |
| 2279 | 197144 | T | C |
| 2280 | 197238 | C | G |
| 2281 | 197246 | T | C |
| 2282 | 197283 | G | C |
| 2283 | 197285 | A | T |
| 2284 | 197316 | C | T |
| 2285 | 197352 | C | T |
| 2286 | 197384 | A | G |
| 2287 | 197390 | A | G |
| 2288 | 197409 | G | A |
| 2289 | 197509 | A | T |
| 2290 | 197539 | G | A |
| 2291 | 197544 | T | C |
| 2292 | 197594 | A | G |
| 2293 | 197617 | G | A |
| 2294 | 197650 | G | T |
| 2295 | 197672 | A | G |
| 2296 | 197676 | C | G |
| 2297 | 197860 | T | C |
| 2298 | 197959 | A | G |
| 2299 | 197964 | A | C |
| 2300 | 197987 | T | C |
| 2301 | 198040 | T | C |
| 2302 | 198081 | A | T |
| 2303 | 198156 | C | G |
| 2304 | 198220 | A | G |
| 2305 | 198249 | A | G |
| 2306 | 198397 | A | G |
| 2307 | 198694 | G | A |
| 2308 | 198775 | T | G |
| 2309 | 198778 | A | T |
| 2310 | 198823 | C | T |
| 2311 | 198892 | G | A |
| 2312 | 198900 | T | G |
| 2313 | 198963 | A | C |
| 2314 | 198989 | A | C |
| 2315 | 199039 | T | C |
| 2316 | 199055 | T | C |
| 2317 | 199155 | A | G |
| 2318 | 199166 | A | G |
| 2319 | 199237 | A | G |
| 2320 | 199561 | T | C |
| 2321 | 199614 | A | G |
| 2322 | 199647 | C | T |
| 2323 | 199695 | A | G |
| 2324 | 199898 | C | T |
| 2325 | 199974 | C | A |
| 2326 | 200033 | G | T |
| 2327 | 200076 | A | G |
| 2328 | 200108 | G | A |
| 2329 | 200137 | G | A |
| 2330 | 200403 | A | G |
| 2331 | 200633 | G | A |
| 2332 | 200884 | G | T |
| 2333 | 201025 | T | A |
| 2334 | 201677 | A | G |
| 2335 | 201709 | T | G |
| 2336 | 201806 | T | C |
| 2337 | 201981 | G | A |
| 2338 | 203223 | T | A |
| 2339 | 203243 | C | T |
| 2340 | 203430 | A | G |
| 2341 | 203539 | A | C |
| 2342 | 203552 | A | G |
| 2343 | 203592 | G | A |
| 2344 | 203656 | T | A |
| 2345 | 203793 | T | C |
| 2346 | 203841 | A | T |
| 2347 | 203876 | G | A |
| 2348 | 203943 | C | A |
| 2349 | 204053 | A | G |
| 2350 | 204165 | A | T |
| 2351 | 204284 | T | C |
| 2352 | 204429 | C | A |
| 2353 | 204451 | C | G |
| 2354 | 204610 | — | A |
| 2355 | 204670 | A | T |
| 2356 | 204725 | G | T |
| 2357 | 204992 | C | T |
| 2358 | 205121 | A | C |
| 2359 | 205198 | G | A |
| 2360 | 205210 | C | A |
| 2361 | 205236 | T | A |
| 2362 | 205257 | T | C |
| 2363 | 205291 | A | G |
| 2364 | 205393 | A | T |
| 2365 | 205546 | — | T |
| 2366 | 205596 | G | T |
| 2367 | 205686 | A | G |
| 2368 | 205705 | A | G |
| 2369 | 205710 | T | C |
| 2370 | 205978 | A | T |
| 2371 | 206187 | G | A |
| 2372 | 206501 | A | C |
| 2373 | 206523 | G | A |
| 2374 | 207402 | C | T |
| 2375 | 207423 | C | T |
| 2376 | 207425 | G | A |
| 2377 | 207690 | A | G |
| 2378 | 207718 | C | T |
| 2379 | 207789 | C | T |
| 2380 | 207864 | T | A |
| 2381 | 208048 | G | A |
| 2382 | 208053 | C | G |
| 2383 | 208131 | A | C |
| 2384 | 208168 | — | C |
| 2385 | 208214 | C | T |
| 2386 | 208254 | A | G |
| 2387 | 208257 | A | G |
| 2388 | 208261 | G | A |
| 2389 | 208600 | G | A |
| 2390 | 208622 | C | T |
| 2391 | 209018 | G | A |
| 2392 | 209034 | A | G |
| 2393 | 209040 | A | G |
| 2394 | 209046 | G | A |
| 2395 | 209067 | G | A |
| 2396 | 209088 | C | T |
| 2397 | 209129 | G | T |
| 2398 | 209222 | G | A |
| 2399 | 209256 | C | T |
| 2400 | 209303 | — | A |
| 2401 | 209362 | C | G |
| 2402 | 209384 | C | G |
| 2403 | 209428 | G | A |
| 2404 | 209516 | G | C |
| 2405 | 209543 | C | T |
| 2406 | 209544 | A | G |
| 2407 | 209603 | G | A |
| 2408 | 209604 | A | T |
| 2409 | 209613 | T | G |
| 2410 | 209614 | C | T |
| 2411 | 209631 | T | C |
| 2412 | 209712 | T | C |
| 2413 | 209745 | G | A |
| 2414 | 209789 | C | T |
| 2415 | 210043 | G | A |
| 2416 | 210213 | C | T |
| 2417 | 210248 | G | A |
| 2418 | 210271 | C | T |
| 2419 | 210435 | T | C |
| 2420 | 210437 | A | G |
| 2421 | 210511 | C | T |
| 2422 | 210526 | T | A |
| 2423 | 210561 | A | G |
| 2424 | 210579 | A | G |
| 2425 | 210690 | A | C |
| 2426 | 210726 | A | C |
| 2427 | 210803 | C | T |
| 2428 | 210820 | G | A |
| 2429 | 210835 | A | G |
| 2430 | 210876 | T | C |
| 2431 | 210885 | A | C |
| 2432 | 210911 | T | C |
| 2433 | 211174 | A | C |
| 2434 | 211202 | G | A |
| 2435 | 211222 | C | T |
| 2436 | 211318 | C | T |
| 2437 | 211325 | A | T |
| 2438 | 211340 | T | A |
| 2439 | 211431 | C | A |
| 2440 | 211490 | A | G |
| 2441 | 211531 | C | G |
| 2442 | 211585 | A | T |
| 2443 | 211630 | C | G |
| 2444 | 211634 | T | C |
| 2445 | 211680 | T | C |
| 2446 | 211883 | C | T |
| 2447 | 211933 | A | G |
| 2448 | 212099 | T | A |
| 2449 | 212108 | C | T |
| 2450 | 212115 | T | C |
| 2451 | 212135 | A | G |
| 2452 | 212258 | T | C |
| 2453 | 212324 | A | T |
| 2454 | 212377 | A | G |
| 2455 | 212393 | T | G |
| 2456 | 212439 | A | C |
| 2457 | 212454 | C | T |
| 2458 | 212521 | T | G |
| 2459 | 212608 | C | T |
| 2460 | 212628 | C | T |
| 2461 | 212669 | A | G |
| 2462 | 212713 | A | G |
| 2463 | 212782 | C | A |
| 2464 | 212826 | C | T |
| 2465 | 212927 | A | G |
| 2466 | 213032 | T | C |
| 2467 | 213068 | A | G |
| 2468 | 213108 | G | A |
| 2469 | 213244 | C | T |
| 2470 | 213302 | A | G |
| 2471 | 213373 | T | G |
| 2472 | 213422 | A | C |
| 2473 | 213547 | T | C |
| 2474 | 213580 | A | G |
| 2475 | 213647 | T | C |
| 2476 | 213757 | C | T |
| 2477 | 213804 | C | A |
| 2478 | 213819 | G | T |
| 2479 | 213876 | C | T |
| 2480 | 213948 | A | T |
| 2481 | 214003 | G | A |
| 2482 | 214004 | A | G |
| 2483 | 214033 | C | A |
| 2484 | 214041 | C | T |
| 2485 | 214115 | A | G |
| 2486 | 214267 | G | A |
| 2487 | 214303 | C | T |
| 2488 | 214354 | C | T |
| 2489 | 214425 | C | T |
| 2490 | 214474 | T | C |
| 2491 | 214549 | C | T |
| 2492 | 214583 | C | T |
| 2493 | 214599 | G | T |
| 2494 | 214642 | A | T |
| 2495 | 214660 | G | A |
| 2496 | 214707 | A | G |
| 2497 | 214745 | G | A |
| 2498 | 214762 | G | A |
| 2499 | 214840 | A | C |
| 2500 | 214848 | A | G |
| 2501 | 214852 | T | C |
| 2502 | 214854 | G | A |
| 2503 | 214927 | C | T |
| 2504 | 215000 | T | C |
| 2505 | 215001 | G | A |
| 2506 | 215044 | T | C |
| 2507 | 215049 | T | A |
| 2508 | 215076 | A | G |
| 2509 | 215101 | A | G |
| 2510 | 215104 | T | C |
| 2511 | 215139 | T | G |
| 2512 | 215335 | C | T |
| 2513 | 215540 | T | A |
| 2514 | 215548 | G | A |
| 2515 | 215549 | T | C |
| 2516 | 215616 | T | C |
| 2517 | 215926 | C | T |
| 2518 | 216047 | — | A |
| 2519 | 216092 | T | C |
| 2520 | 216170 | G | C |
| 2521 | 216212 | C | A |
| 2522 | 216230 | C | T |
| 2523 | 216263 | T | C |
| 2524 | 216361 | T | G |
| 2525 | 216412 | C | T |
| 2526 | 216413 | G | A |
| 2527 | 216437 | G | C |
| 2528 | 216469 | C | T |
| 2529 | 216480 | A | G |
| 2530 | 216499 | T | G |
| 2531 | 216529 | C | G |
| 2532 | 216647 | C | T |
| 2533 | 216708 | T | A |
| 2534 | 216720 | A | G |
| 2535 | 216765 | A | G |
| 2536 | 216781 | G | A |
| 2537 | 216803 | T | G |
| 2538 | 216834 | A | G |
| 2539 | 216838 | G | A |
| 2540 | 216869 | G | T |
| 2541 | 216993 | C | T |
| 2542 | 217009 | A | C |
| 2543 | 217044 | A | G |
| 2544 | 217133 | T | G |
| 2545 | 217163 | C | A |
| 2546 | 217169 | C | T |
| 2547 | 217173 | C | T |
| 2548 | 217175 | A | G |
| 2549 | 217309 | G | A |
| 2550 | 217477 | C | A |
| 2551 | 217658 | G | A |
| 2552 | 217812 | A | C |
| 2553 | 217915 | G | A |
| 2554 | 217954 | C | T |
| 2555 | 217955 | A | G |
| 2556 | 217986 | T | C |
| 2557 | 218249 | G | A |
| 2558 | 218286 | G | A |
| 2559 | 218409 | A | C |
| 2560 | 218504 | G | T |
| 2561 | 218532 | A | T |
| 2562 | 218533 | A | G |
| 2563 | 218536 | A | T |
| 2564 | 218606 | A | G |
| 2565 | 218641 | T | C |
| 2566 | 218671 | A | C |
| 2567 | 218807 | C | T |
| 2568 | 218935 | G | A |
| 2569 | 219430 | A | G |
| 2570 | 219500 | T | C |
| 2571 | 219578 | T | A |
| 2572 | 219627 | A | G |
| 2573 | 219634 | A | G |
| 2574 | 219675 | T | G |
| 2575 | 219794 | A | C |
| 2576 | 219891 | A | G |
| 2577 | 219963 | C | T |
| 2578 | 220079 | T | G |
| 2579 | 220191 | G | A |
| 2580 | 220217 | A | G |
| 2581 | 220258 | T | C |
| 2582 | 220286 | C | A |
| 2583 | 220376 | T | C |
| 2584 | 220383 | A | G |
| 2585 | 220403 | C | T |
| 2586 | 220446 | — | AA |
| 2587 | 220447 | G | A |
| 2588 | 220607 | A | G |
| 2589 | 220610 | G | A |
| 2590 | 220663 | C | T |
| 2591 | 220712 | A | T |
| 2592 | 220759 | A | T |
| 2593 | 220778 | C | A |
| 2594 | 220780 | T | C |
| 2595 | 220800 | G | A |
| 2596 | 220815 | A | G |
| 2597 | 220854 | T | G |
| 2598 | 220860 | G | A |
| 2599 | 220873 | G | A |
| 2600 | 220888 | T | C |
| 2601 | 220927 | T | C |
| 2602 | 220936 | A | G |
| 2603 | 221034 | A | G |
| 2604 | 221292 | A | G |
| 2605 | 221296 | G | C |
| 2606 | 221352 | C | T |
| 2607 | 221407 | C | T |
| 2608 | 221438 | T | C |
| 2609 | 221555 | G | A |
| 2610 | 221586 | C | A |
| 2611 | 221590 | A | G |
| 2612 | 221598 | — | T |
| 2613 | 221644 | G | A |
| 2614 | 221666 | T | G |
| 2615 | 221691 | G | A |
| 2616 | 221849 | A | G |
| 2617 | 221879 | C | T |
| 2618 | 221897 | — | G |
| 2619 | 221921 | A | G |
| 2620 | 221945 | T | A |
| 2621 | 221956 | A | G |
| 2622 | 221957 | C | T |
| 2623 | 221992 | C | T |
| 2624 | 222014 | C | T |
| 2625 | 222334 | A | G |
| 2626 | 222375 | G | A |
| 2627 | 222524 | G | A |
| 2628 | 222603 | C | T |
| 2629 | 222612 | G | A |
| 2630 | 222660 | G | A |
| 2631 | 222828 | T | C |
| 2632 | 222838 | A | G |
| 2633 | 222964 | C | T |
| 2634 | 222971 | A | G |
| 2635 | 222987 | G | A |
| 2636 | 223113 | G | A |
| 2637 | 223181 | A | C |
| 2638 | 223207 | C | T |
| 2639 | 223248 | G | A |
| 2640 | 223262 | A | G |
| 2641 | 223277 | G | T |
| 2642 | 223376 | C | T |
| 2643 | 223398 | A | G |
| 2644 | 223590 | C | T |
| 2645 | 223742 | A | T |
| 2646 | 223786 | C | T |
| 2647 | 223840 | G | A |
| 2648 | 224330 | G | A |
| 2649 | 224395 | G | T |
| 2650 | 224458 | G | T |
| 2651 | 224465 | A | G |
| 2652 | 224516 | G | A |
| 2653 | 224577 | A | T |
| 2654 | 224612 | C | T |
| 2655 | 224730 | A | G |
| 2656 | 225053 | G | A |
| 2657 | 225183 | T | C |
| 2658 | 225207 | T | C |
| 2659 | 225259 | G | A |
| 2660 | 225342 | T | A |
| 2661 | 225440 | T | A |
| 2662 | 225441 | A | T |
| 2663 | 225450 | G | T |
| 2664 | 225487 | C | T |
| 2665 | 225527 | C | T |
| 2666 | 225596 | T | G |
| 2667 | 225612 | A | C |
| 2668 | 225729 | T | C |
| 2669 | 225795 | C | T |
| 2670 | 225883 | T | C |
| 2671 | 226003 | C | A |
| 2672 | 226045 | T | C |
| 2673 | 226053 | T | A |
| 2674 | 226177 | T | A |
| 2675 | 226178 | T | A |
| 2676 | 226187 | A | G |
| 2677 | 226238 | T | C |
| 2678 | 226544 | G | A |
| 2679 | 226632 | G | A |
| 2680 | 226653 | C | T |
| 2681 | 226705 | T | C |
| 2682 | 226903 | T | C |
| 2683 | 226909 | A | C |
| 2684 | 226931 | G | A |
| 2685 | 226943 | C | A |
| 2686 | 227021 | T | G |
| 2687 | 227161 | A | G |
| 2688 | 227299 | G | A |
| 2689 | 227338 | T | C |
| 2690 | 227454 | C | T |
| 2691 | 227668 | A | G |
| 2692 | 227739 | C | A |
| 2693 | 227793 | A | G |
| 2694 | 227885 | G | A |
| 2695 | 228027 | C | T |
| 2696 | 228059 | G | A |
| 2697 | 228064 | T | C |
| 2698 | 228118 | G | A |
| 2699 | 228150 | G | T |
| 2700 | 228273 | A | T |
| 2701 | 228386 | G | A |
| 2702 | 228579 | G | A |
| 2703 | 228633 | C | A |
| 2704 | 228687 | T | C |
| 2705 | 228712 | T | C |
| 2706 | 228741 | C | A |
| 2707 | 228847 | C | T |
| 2708 | 228854 | C | T |
| 2709 | 228861 | G | A |
| 2710 | 228998 | G | A |
| 2711 | 229010 | A | G |
| 2712 | 229105 | G | A |
| 2713 | 229119 | T | G |
| 2714 | 229129 | G | A |
| 2715 | 229130 | C | T |
| 2716 | 229133 | G | A |
| 2717 | 229150 | T | C |
| 2718 | 229181 | A | G |
| 2719 | 229226 | C | T |
| 2720 | 229302 | T | A |
| 2721 | 229338 | C | T |
| 2722 | 229351 | T | C |
| 2723 | 229375 | T | C |
| 2724 | 229404 | T | C |
| 2725 | 229451 | A | T |
| 2726 | 229461 | A | G |
| 2727 | 229587 | C | A |
| 2728 | 229609 | T | C |
| 2729 | 229618 | C | G |
| 2730 | 229666 | C | T |
| 2731 | 230603 | G | A |
| 2732 | 230885 | T | A |
| 2733 | 231349 | A | G |
| 2734 | 231858 | T | A |
| 2735 | 231864 | T | A |
| 2736 | 231866 | A | G |
| 2737 | 231879 | T | C |
| 2738 | 232072 | A | C |
| 2739 | 232087 | T | A |
| 2740 | 232173 | G | C |
| 2741 | 232263 | T | A |
| 2742 | 232290 | G | A |
| 2743 | 232293 | T | C |
| 2744 | 232315 | C | T |
| 2745 | 232440 | C | G |
| 2746 | 232471 | A | G |
| 2747 | 232554 | T | C |
| 2748 | 232576 | — | T |
| 2749 | 232705 | C | T |
| 2750 | 232714 | A | G |
| 2751 | 232745 | A | G |
| 2752 | 232990 | T | C |
| 2753 | 233013 | A | G |
| 2754 | 233140 | T | C |
| 2755 | 233186 | G | A |
| 2756 | 233253 | C | G |
| 2757 | 233254 | A | T |
| 2758 | 233456 | A | G |
| 2759 | 233468 | T | A |
| 2760 | 233471 | T | C |
| 2761 | 233493 | T | G |
| 2762 | 233526 | C | T |
| 2763 | 233615 | A | G |
| 2764 | 234282 | A | G |
| 2765 | 234480 | A | T |
| 2766 | 234481 | A | T |
| 2767 | 234484 | A | G |
| 2768 | 234505 | G | A |
| 2769 | 234519 | T | C |
| 2770 | 234598 | A | T |
| 2771 | 234641 | A | T |
| 2772 | 234825 | T | G |
| 2773 | 234862 | A | T |
| 2774 | 234872 | T | G |
| 2775 | 234879 | G | C |
| 2776 | 234880 | G | C |
| 2777 | 234959 | G | T |
| 2778 | 235123 | T | C |
| 2779 | 235162 | G | A |
| 2780 | 235170 | A | C |
| 2781 | 235202 | A | T |
| 2782 | 235242 | T | A |
| 2783 | 235244 | T | A |
| 2784 | 235313 | A | C |
| 2785 | 235372 | T | A |
| 2786 | 235868 | G | A |
| 2787 | 235898 | G | A |
| 2788 | 235904 | T | A |
| 2789 | 236043 | C | T |
| 2790 | 236083 | G | C |
| 2791 | 236084 | A | G |
| 2792 | 236089 | C | T |
| 2793 | 236431 | T | C |
| 2794 | 236447 | T | G |
| 2795 | 243825 | A | C |
| 2796 | 243844 | A | G |
| 2797 | 246201 | A | G |
| 2798 | 246217 | T | C |
| 2799 | 246222 | T | G |
| 2800 | 246226 | C | A |
| 2801 | 246236 | T | G |
| 2802 | 246698 | T | C |
| 2803 | 246713 | G | A |
| 2804 | 246716 | C | T |
| 2805 | 246889 | G | T |
| 2806 | 246925 | A | G |
| 2807 | 246990 | T | A |
| 2808 | 246992 | T | A |
| 2809 | 247632 | T | C |
| 2810 | 247678 | T | C |
| 2811 | 247731 | G | A |
| 2812 | 247743 | C | T |
| 2813 | 247763 | A | G |
| 2814 | 247983 | C | G |
| 2815 | 248245 | A | G |
| 2816 | 248811 | C | T |
| 2817 | 248824 | T | C |
| 2818 | 249271 | A | G |
| 2819 | 249284 | G | A |
| 2820 | 252872 | A | C |
| 2821 | 256931 | C | T |
| 2822 | 256934 | T | C |
| 2823 | 257038 | C | T |
| 2824 | 257089 | G | T |
| 2825 | 257150 | T | C |
| 2826 | 257346 | C | T |
| 2827 | 257364 | A | T |
| 2828 | 257366 | C | T |
| 2829 | 257461 | T | A |
| 2830 | 257465 | G | T |
| 2831 | 257484 | T | G |
| 2832 | 257504 | T | A |
| 2833 | 257532 | G | T |
| 2834 | 257588 | G | A |
| 2835 | 257644 | A | T |
| 2836 | 257648 | G | A |
| 2837 | 257657 | A | G |
| 2838 | 257671 | A | G |
| 2839 | 257699 | T | A |
| 2840 | 257719 | G | C |
| 2841 | 257733 | C | T |
| 2842 | 257811 | G | A |
| 2843 | 257843 | C | A |
| 2844 | 257853 | C | T |
| 2845 | 257918 | G | T |
| 2846 | 257920 | A | C |
| 2847 | 257929 | C | T |
| 2848 | 257930 | A | C |
| 2849 | 257983 | T | C |
| 2850 | 258055 | G | A |
| 2851 | 258094 | G | A |
| 2852 | 258097 | G | T |
| 2853 | 258102 | T | C |
| 2854 | 258106 | G | A |
| 2855 | 258132 | C | T |
| 2856 | 258165 | T | C |
| 2857 | 258200 | T | C |
| 2858 | 258217 | A | G |
| 2859 | 258218 | A | T |
| 2860 | 258231 | T | C |
| 2861 | 258245 | C | T |
| 2862 | 258338 | G | T |
| 2863 | 258388 | A | C |
| 2864 | 258389 | T | C |
| 2865 | 258392 | C | G |
| 2866 | 258395 | C | T |
| 2867 | 258489 | A | T |
| 2868 | 258536 | A | G |
| 2869 | 258583 | T | C |
| 2870 | 258584 | A | G |
| 2871 | 258626 | A | G |
| 2872 | 258640 | G | A |
| 2873 | 258687 | A | G |
| 2874 | 258696 | T | C |
| 2875 | 258700 | T | C |
| 2876 | 258726 | A | G |
| 2877 | 258734 | C | T |
| 2878 | 258800 | T | G |
| 2879 | 258804 | T | C |
| 2880 | 258805 | G | A |
| 2881 | 258810 | A | T |
| 2882 | 258830 | G | C |
| 2883 | 258846 | T | C |
| 2884 | 258851 | T | G |
| 2885 | 258873 | T | C |
| 2886 | 258896 | A | G |
| 2887 | 258957 | C | T |
| 2888 | 258963 | C | G |
| 2889 | 258965 | A | G |
| 2890 | 258991 | T | C |
| 2891 | 259007 | C | T |
| 2892 | 259024 | C | G |
| 2893 | 259069 | C | T |
| 2894 | 259095 | C | A |
| 2895 | 259216 | C | T |
| 2896 | 259233 | G | A |
| 2897 | 259235 | T | A |
| 2898 | 259276 | T | C |
| 2899 | 259308 | C | A |
| 2900 | 259427 | A | G |
| 2901 | 259473 | T | C |
| 2902 | 259474 | A | G |
| 2903 | 259484 | A | C |
| 2904 | 259486 | A | G |
| 2905 | 259490 | T | C |
| 2906 | 259504 | A | T |
| 2907 | 259575 | G | A |
| 2908 | 259605 | T | C |
| 2909 | 259690 | C | T |
| 2910 | 259726 | C | T |
| 2911 | 259736 | C | A |
| 2912 | 259760 | C | T |
| 2913 | 259924 | G | T |
| 2914 | 260002 | G | C |
| 2915 | 260140 | G | C |
| 2916 | 260225 | G | A |
| 2917 | 260294 | A | G |
| 2918 | 260341 | T | C |
| 2919 | 260394 | A | G |
| 2920 | 260546 | A | G |
| 2921 | 260556 | C | T |
| 2922 | 260572 | T | G |
| 2923 | 260599 | A | G |
| 2924 | 260611 | G | C |
| 2925 | 260612 | A | C |
| 2926 | 260616 | G | A |
| 2927 | 260677 | T | A |
| 2928 | 260713 | G | C |
| 2929 | 260715 | T | G |
| 2930 | 260854 | C | T |
| 2931 | 260869 | — | T |
| 2932 | 261010 | C | T |
| 2933 | 261037 | T | G |
| 2934 | 261079 | T | A |
| 2935 | 261133 | G | A |
| 2936 | 261141 | G | T |
| 2937 | 261171 | G | A |
| 2938 | 261254 | A | C |
| 2939 | 261456 | A | T |
| 2940 | 261483 | C | A |
| 2941 | 261570 | G | A |
| 2942 | 261639 | C | T |
| 2943 | 261967 | C | T |
| 2944 | 262135 | — | TT |
| 2945 | 262163 | T | C |
| 2946 | 262267 | T | C |
| 2947 | 262294 | G | A |
| 2948 | 262491 | T | C |
| 2949 | 262497 | C | T |
| 2950 | 262532 | T | G |
| 2951 | 262552 | C | T |
| 2952 | 262605 | T | A |
| 2953 | 262805 | C | T |
| 2954 | 262835 | A | C |
| 2955 | 262853 | — | GT |
| 2956 | 262976 | C | T |
| 2957 | 263015 | G | A |
| 2958 | 263021 | T | C |
| 2959 | 263084 | G | C |
| 2960 | 263140 | C | G |
| 2961 | 263150 | C | T |
| 2962 | 263212 | C | T |
| 2963 | 263296 | T | A |
| 2964 | 263341 | T | C |
| 2965 | 263343 | T | C |
| 2966 | 263387 | C | T |
| 2967 | 263514 | T | C |
| 2968 | 263552 | T | C |
| 2969 | 263686 | T | C |
| 2970 | 263821 | T | C |
| 2971 | 263847 | A | G |
| 2972 | 263930 | T | A |
| 2973 | 264117 | A | C |
| 2974 | 264172 | C | T |
| 2975 | 264316 | T | A |
| 2976 | 264349 | A | G |
| 2977 | 264379 | A | C |
| 2978 | 264511 | C | T |
| 2979 | 264518 | G | C |
| 2980 | 264521 | A | G |
| 2981 | 264534 | A | G |
| 2982 | 264592 | A | C |
| 2983 | 264682 | C | A |
| 2984 | 264724 | — | ATAT |
| 2985 | 264926 | — | T |
| 2986 | 265054 | C | T |
| 2987 | 265231 | A | G |
| 2988 | 265362 | G | C |
| 2989 | 265484 | T | A |
| 2990 | 265798 | T | C |
| 2991 | 265800 | G | A |
| 2992 | 265945 | C | T |
| 2993 | 266008 | G | C |
| 2994 | 266010 | C | G |
| 2995 | 266013 | G | A |
| 2996 | 266076 | T | C |
| 2997 | 266088 | A | T |
| 2998 | 266144 | G | A |
| 2999 | 266171 | G | A |
| 3000 | 266253 | — | TC |
| 3001 | 266333 | C | G |
| 3002 | 266421 | T | C |
| 3003 | 266436 | G | C |
| 3004 | 266477 | A | G |
| 3005 | 266503 | A | T |
| 3006 | 266523 | C | T |
| 3007 | 266570 | — | TGG |
| 3008 | 266596 | G | A |
| 3009 | 266613 | T | C |
| 3010 | 266628 | C | A |
| 3011 | 266639 | A | T |
| 3012 | 266662 | T | C |
| 3013 | 266702 | G | T |
| 3014 | 266707 | C | T |
| 3015 | 266733 | C | A |
| 3016 | 266804 | C | T |
| 3017 | 266849 | A | C |
| 3018 | 266880 | T | C |
| 3019 | 266943 | G | A |
| 3020 | 266999 | C | G |
| 3021 | 267030 | C | T |
| 3022 | 267090 | A | T |
| 3023 | 267113 | T | C |
| 3024 | 267163 | G | A |
| 3025 | 267196 | T | A |
| 3026 | 267213 | C | T |
| 3027 | 267226 | G | C |
| 3028 | 267257 | T | G |
| 3029 | 267341 | A | C |
| 3030 | 267349 | A | T |
| 3031 | 267355 | G | A |
| 3032 | 267359 | A | T |
| 3033 | 267375 | C | G |
| 3034 | 267443 | A | C |
| 3035 | 267491 | — | G |
| 3036 | 267503 | G | T |
| 3037 | 267544 | A | G |
| 3038 | 267629 | T | G |
| 3039 | 267654 | G | A |
| 3040 | 267674 | A | G |
| 3041 | 267711 | A | T |
| 3042 | 267712 | A | G |
| 3043 | 267717 | C | T |
| 3044 | 267725 | C | T |
| 3045 | 267766 | T | G |
| 3046 | 267776 | A | G |
| 3047 | 267815 | T | C |
| 3048 | 267822 | C | T |
| 3049 | 267863 | C | T |
| 3050 | 267869 | A | G |
| 3051 | 267896 | C | T |
| 3052 | 267976 | C | A |
| 3053 | 267981 | A | G |
| 3054 | 268004 | C | G |
| 3055 | 268107 | T | C |
| 3056 | 268115 | A | T |
| 3057 | 268117 | G | A |
| 3058 | 268195 | T | G |
| 3059 | 268235 | A | G |
| 3060 | 268255 | T | A |
| 3061 | 268266 | A | G |
| 3062 | 268308 | T | C |
| 3063 | 268337 | C | A |
| 3064 | 268369 | A | T |
| 3065 | 268370 | T | A |
| 3066 | 268421 | G | T |
| 3067 | 268436 | T | A |
| 3068 | 268480 | T | A |
| 3069 | 268494 | G | T |
| 3070 | 268519 | C | T |
| 3071 | 268520 | G | T |
| 3072 | 268658 | T | C |
| 3073 | 268893 | T | C |
| 3074 | 268979 | T | A |
| 3075 | 269014 | C | T |
| 3076 | 269044 | G | C |
| 3077 | 269140 | C | A |
| 3078 | 269153 | C | G |
| 3079 | 269627 | C | A |
| 3080 | 269662 | C | T |
| 3081 | 269665 | A | G |
| 3082 | 269680 | T | A |
| 3083 | 269784 | T | G |
| 3084 | 269968 | G | T |
| 3085 | 270089 | A | T |
| 3086 | 270132 | T | C |
| 3087 | 270182 | T | A |
| 3088 | 270235 | C | T |
| 3089 | 270288 | G | T |
| 3090 | 270362 | G | A |
| 3091 | 270418 | C | A |
| 3092 | 270441 | C | T |
| 3093 | 270690 | T | C |
| 3094 | 270700 | A | G |
| 3095 | 270744 | G | A |
| 3096 | 270864 | T | G |
| 3097 | 270872 | A | G |
| 3098 | 270885 | A | C |
| 3099 | 270971 | C | T |
| 3100 | 271092 | G | C |
| 3101 | 271301 | — | A |
| 3102 | 271387 | T | A |
| 3103 | 271399 | C | T |
| 3104 | 271617 | C | T |
| 3105 | 271632 | A | T |
| 3106 | 271645 | A | T |
| 3107 | 271648 | T | C |
| 3108 | 271652 | A | T |
| 3109 | 271710 | A | T |
| 3110 | 271827 | G | T |
| 3111 | 272005 | A | G |
| 3112 | 272080 | A | G |
| 3113 | 272131 | C | G |
| 3114 | 272176 | T | A |
| 3115 | 272226 | G | A |
| 3116 | 272576 | A | C |
| 3117 | 272597 | G | A |
| 3118 | 272711 | A | C |
| 3119 | 272721 | T | G |
| 3120 | 272724 | G | T |
| 3121 | 272725 | G | T |
| 3122 | 272736 | C | A |
| 3123 | 272754 | T | C |
| 3124 | 272800 | T | A |
| 3125 | 272809 | T | C |
| 3126 | 272818 | G | A |
| 3127 | 272954 | A | T |
| 3128 | 272988 | A | G |
| 3129 | 272989 | T | C |
| 3130 | 273100 | T | C |
| 3131 | 273135 | T | C |
| 3132 | 273175 | G | A |
| 3133 | 273264 | T | A |
| 3134 | 273283 | C | A |
| 3135 | 273328 | T | G |
| 3136 | 273350 | T | A |
| 3137 | 273402 | A | C |
| 3138 | 273432 | T | C |
| 3139 | 273434 | A | G |
| 3140 | 273480 | G | C |
| 3141 | 273514 | T | C |
| 3142 | 273539 | C | A |
| 3143 | 273559 | T | C |
| 3144 | 273680 | T | C |
| 3145 | 273806 | C | T |
| 3146 | 273939 | G | A |
| 3147 | 274035 | G | A |
| 3148 | 274096 | A | T |
| 3149 | 274117 | T | A |
| 3150 | 274196 | T | A |
| 3151 | 274234 | A | C |
| 3152 | 274249 | C | T |
| 3153 | 274303 | A | C |
| 3154 | 274322 | G | T |
| 3155 | 274352 | C | T |
| 3156 | 274363 | T | C |
| 3157 | 274387 | T | C |
| 3158 | 274395 | T | A |
| 3159 | 274508 | C | G |
| 3160 | 274570 | G | A |
| 3161 | 274594 | T | C |
| 3162 | 274728 | G | A |
| 3163 | 274836 | T | G |
| 3164 | 274911 | C | G |
| 3165 | 274926 | G | A |
| 3166 | 274928 | C | T |
| 3167 | 275023 | G | T |
| 3168 | 275066 | T | G |
| 3169 | 275071 | — | T |
| 3170 | 275108 | G | T |
| 3171 | 275264 | T | C |
| 3172 | 275273 | C | T |
| 3173 | 275284 | C | A |
| 3174 | 275305 | T | G |
| 3175 | 275378 | A | G |
| 3176 | 275381 | G | A |
| 3177 | 275438 | C | A |
| 3178 | 275448 | T | G |
| 3179 | 275867 | T | A |
| 3180 | 275890 | T | C |
| 3181 | 275922 | T | A |
| 3182 | 275923 | G | T |
| 3183 | 275939 | C | A |
| 3184 | 275966 | T | C |
| 3185 | 276037 | T | C |
| 3186 | 276146 | C | A |
| 3187 | 276149 | T | G |
| 3188 | 276164 | T | C |
| 3189 | 276178 | A | C |
| 3190 | 276229 | C | T |
| 3191 | 276300 | G | A |
| 3192 | 276303 | A | G |
| 3193 | 276532 | T | A |
| 3194 | 276542 | G | A |
| 3195 | 276560 | T | C |
| 3196 | 276583 | A | T |
| 3197 | 276640 | C | G |
| 3198 | 276643 | C | T |
| 3199 | 276649 | C | G |
| 3200 | 276726 | C | T |
| 3201 | 276794 | T | C |
| 3202 | 276932 | C | T |
| 3203 | 276956 | A | C |
| 3204 | 277008 | A | T |
| 3205 | 277021 | A | T |
| 3206 | 277053 | C | T |
| 3207 | 277161 | T | A |
| 3208 | 277184 | C | T |
| 3209 | 277186 | A | G |
| 3210 | 278578 | G | A |
| 3211 | 278745 | C | T |
| 3212 | 278746 | T | A |
| 3213 | 278753 | A | T |
| 3214 | 279105 | C | T |
| 3215 | 279112 | T | C |
| 3216 | 279130 | A | G |
| 3217 | 279165 | C | A |
| 3218 | 279233 | T | A |
| 3219 | 279487 | T | C |
| 3220 | 279495 | C | T |
| 3221 | 279704 | T | A |
| 3222 | 279718 | A | C |
| 3223 | 279773 | T | A |
| 3224 | 279799 | A | G |
| 3225 | 279840 | G | A |
| 3226 | 279914 | T | C |
| 3227 | 279922 | T | G |
| 3228 | 279935 | C | A |
| 3229 | 280137 | G | A |
| 3230 | 280179 | C | T |
| 3231 | 280240 | A | G |
| 3232 | 280254 | G | A |
| 3233 | 280278 | C | G |
| 3234 | 280300 | C | A |
| 3235 | 280306 | G | T |
| 3236 | 280317 | C | G |
| 3237 | 280330 | G | A |
| 3238 | 280336 | G | T |
| 3239 | 280337 | G | C |
| 3240 | 280371 | G | A |
| 3241 | 280378 | C | T |
| 3242 | 280425 | G | A |
| 3243 | 280543 | G | A |
| 3244 | 280547 | T | C |
| 3245 | 280557 | T | G |
| 3246 | 280575 | C | G |
| 3247 | 280614 | C | A |
| 3248 | 280617 | G | T |
| 3249 | 280651 | T | A |
| 3250 | 280652 | T | C |
| 3251 | 280658 | G | A |
| 3252 | 280662 | T | A |
| 3253 | 280732 | T | A |
| 3254 | 280733 | T | C |
| 3255 | 280748 | C | A |
| 3256 | 280862 | C | G |
| 3257 | 281479 | C | G |
| 3258 | 281481 | A | C |
| 3259 | 281493 | G | C |
| 3260 | 281639 | C | G |
| 3261 | 281640 | A | G |
| 3262 | 282948 | T | C |
| 3263 | 287002 | A | T |
| 3264 | 287003 | T | A |
| 3265 | 287101 | T | C |
| 3266 | 287108 | G | A |
| 3267 | 287141 | C | G |
| 3268 | 287144 | G | A |
| 3269 | 287149 | C | T |
| 3270 | 287275 | G | A |
| 3271 | 287344 | A | T |
| 3272 | 287381 | T | A |
| 3273 | 287393 | T | C |
| 3274 | 287397 | T | C |
| 3275 | 287529 | T | C |
| 3276 | 287545 | A | T |
| 3277 | 287557 | A | C |
| 3278 | 287607 | T | C |
| 3279 | 287641 | T | G |
| 3280 | 287945 | G | C |
| 3281 | 287969 | A | G |
| 3282 | 287985 | A | G |
| 3283 | 288018 | G | C |
| 3284 | 288092 | C | A |
| 3285 | 288095 | G | A |
| 3286 | 288102 | T | C |
| 3287 | 288643 | G | T |
| 3288 | 288646 | C | G |
| 3289 | 288654 | G | A |
| 3290 | 288655 | A | G |
| 3291 | 288660 | G | A |
| 3292 | 288671 | T | C |
| 3293 | 288672 | C | A |
| 3294 | 288830 | G | A |
| 3295 | 288836 | G | A |
| 3296 | 288870 | G | C |
| 3297 | 288871 | C | A |
| 3298 | 288886 | A | C |
| 3299 | 288943 | C | T |
| 3300 | 288962 | G | A |
| 3301 | 288970 | G | A |
| 3302 | 289009 | C | T |
| 3303 | 289037 | T | G |
| 3304 | 289038 | C | G |
| 3305 | 289156 | G | C |
| 3306 | 289162 | C | G |
| 3307 | 289264 | A | T |
| 3308 | 289281 | G | C |
| 3309 | 289284 | A | G |
| 3310 | 289526 | G | A |
| 3311 | 289567 | G | T |
| 3312 | 289575 | A | G |
| 3313 | 289598 | C | A |
| 3314 | 289630 | A | T |
| 3315 | 289703 | G | A |
| 3316 | 289745 | A | T |
| 3317 | 289764 | T | A |
| 3318 | 289792 | G | T |
| 3319 | 289862 | G | T |
| 3320 | 289877 | A | C |
| 3321 | 289955 | T | G |
| 3322 | 289977 | T | G |
| 3323 | 290045 | A | T |
| 3324 | 290046 | T | A |
| 3325 | 290054 | C | T |
| 3326 | 290098 | A | T |
| 3327 | 290292 | A | G |
| 3328 | 291161 | T | C |
| 3329 | 291386 | T | A |
| 3330 | 292155 | G | A |
| 3331 | 292466 | G | A |
| 3332 | 292971 | A | C |
| 3333 | 293726 | T | C |
| 3334 | 293919 | A | T |
| 3335 | 294541 | A | C |
| 3336 | 294598 | G | A |
| 3337 | 294649 | T | C |
| 3338 | 294697 | A | G |
| 3339 | 295680 | C | A |
| 3340 | 296385 | C | A |
| 3341 | 296649 | A | G |
| 3342 | 296656 | G | T |
| 3343 | 296812 | C | T |
| 3344 | 296832 | C | A |
| 3345 | 296869 | C | A |
| 3346 | 297026 | G | A |
| 3347 | 297042 | T | C |
| 3348 | 297605 | T | C |
| 3349 | 297697 | T | C |
| 3350 | 298499 | T | A |
| 3351 | 299112 | A | C |
| 3352 | 301248 | T | C |
| 3353 | 301502 | T | G |
| 3354 | 302448 | A | G |
| 3355 | 302653 | A | G |
| 3356 | 302711 | G | T |
| 3357 | 302917 | C | A |
| 3358 | 303370 | T | C |
| 3359 | 303828 | G | A |
| 3360 | 304193 | A | C |
| 3361 | 304638 | A | G |
| 3362 | 305141 | T | C |
| 3363 | 305373 | T | C |
| 3364 | 305441 | A | G |
| 3365 | 305529 | T | G |
| 3366 | 305554 | T | C |
| 3367 | 306016 | G | C |
| 3368 | 306697 | A | G |
| 3369 | 307059 | G | T |
| 3370 | 307091 | T | C |
| 3371 | 307111 | A | T |
| 3372 | 307161 | A | T |
| 3373 | 307188 | A | G |
| 3374 | 307384 | T | A |
| 3375 | 307547 | A | T |
| 3376 | 307672 | T | G |
| 3377 | 307698 | C | T |
| 3378 | 307741 | A | C |
| 3379 | 307744 | A | G |
| 3380 | 307809 | A | G |
| 3381 | 307905 | C | A |
| 3382 | 308028 | G | T |
| 3383 | 308164 | C | G |
| 3384 | 308185 | A | G |
| 3385 | 308535 | A | G |
| 3386 | 308574 | G | T |
| 3387 | 308583 | G | A |
| 3388 | 308657 | C | G |
| 3389 | 308722 | T | C |
| 3390 | 308728 | T | A |
| 3391 | 308953 | T | C |
| 3392 | 309025 | G | A |
| 3393 | 309116 | A | G |
| 3394 | 309369 | A | G |
| 3395 | 309501 | G | A |
| 3396 | 309577 | C | T |
| 3397 | 309626 | A | T |
| 3398 | 309637 | A | G |
| 3399 | 309768 | T | A |
| 3400 | 309800 | C | T |
| 3401 | 309877 | A | G |
| 3402 | 310022 | G | A |
| 3403 | 310025 | G | A |
| 3404 | 310039 | T | C |
| 3405 | 310084 | T | C |
| 3406 | 310119 | T | C |
| 3407 | 310123 | C | T |
| 3408 | 310151 | C | A |
| 3409 | 310185 | T | C |
| 3410 | 310197 | C | A |
| 3411 | 310464 | T | C |
| 3412 | 310703 | G | A |
| 3413 | 310922 | C | A |
| 3414 | 310933 | C | T |
| 3415 | 310946 | T | C |
| 3416 | 310970 | T | A |
| 3417 | 311010 | T | C |
| 3418 | 311137 | T | G |
| 3419 | 311183 | A | G |
| 3420 | 311184 | A | G |
| 3421 | 311473 | A | G |
| 3422 | 311857 | G | C |
| 3423 | 311937 | A | C |
| 3424 | 312580 | A | C |
| 3425 | 312684 | A | T |
| 3426 | 312749 | T | A |
| 3427 | 313009 | G | A |
| 3428 | 313307 | G | A |
| 3429 | 313340 | — | G |
| 3430 | 313491 | A | C |
| 3431 | 313550 | C | A |
| 3432 | 313648 | G | A |
| 3433 | 314143 | C | T |
| 3434 | 314305 | G | C |
| 3435 | 314384 | G | A |
| 3436 | 314504 | T | C |
| 3437 | 314703 | C | A |
| 3438 | 314810 | T | A |
| 3439 | 314821 | A | T |
| 3440 | 315163 | G | T |
| 3441 | 315443 | G | A |
| 3442 | 315514 | C | A |
| 3443 | 315611 | T | G |
| 3444 | 315634 | T | C |
| 3445 | 315684 | A | G |
| 3446 | 315694 | T | C |
| 3447 | 315855 | C | T |
| 3448 | 316534 | G | A |
| 3449 | 316594 | G | A |
| 3450 | 316843 | — | ACAGCAAT |
| 3451 | 317340 | T | C |
| 3452 | 317641 | C | T |
| 3453 | 317993 | A | G |
| 3454 | 318084 | A | G |
| 3455 | 318212 | T | C |
| 3456 | 318451 | T | C |
| 3457 | 318465 | T | A |
| 3458 | 318638 | C | G |
| 3459 | 318893 | T | A |
| 3460 | 319458 | T | A |
| 3461 | 319546 | G | A |
| 3462 | 319620 | A | G |
| 3463 | 319626 | T | G |
| 3464 | 319790 | A | T |
| 3465 | 319994 | A | C |
| 3466 | 320393 | A | G |
| 3467 | 321238 | T | C |
| 3468 | 321457 | T | A |
| 3469 | 321495 | A | C |
| 3470 | 321558 | A | T |
| 3471 | 321559 | A | T |
| 3472 | 321560 | A | T |
| 3473 | 321753 | A | C |
| 3474 | 321873 | T | C |
| 3475 | 322481 | G | A |
| 3476 | 322998 | T | G |
| 3477 | 323155 | T | A |
| 3478 | 323358 | T | C |
| 3479 | 323461 | A | G |
| 3480 | 323489 | A | C |
| 3481 | 323825 | G | A |
| 3482 | 323865 | A | C |
| 3483 | 323923 | A | G |
| 3484 | 324280 | G | A |
| 3485 | 324443 | — | A |
| 3486 | 325103 | G | C |
| 3487 | 325282 | T | C |
| 3488 | 325284 | C | T |
| 3489 | 325307 | G | A |
| 3490 | 325683 | T | A |
| 3491 | 326047 | G | A |
| 3492 | 326396 | G | T |
| 3493 | 326443 | C | T |
| 3494 | 326530 | A | G |
| 3495 | 326625 | G | A |
| 3496 | 326701 | A | G |
| 3497 | 326996 | T | C |
| 3498 | 327039 | G | A |
| 3499 | 327161 | C | T |
| 3500 | 327259 | A | G |
| 3501 | 327315 | C | T |
| 3502 | 327357 | C | T |
| 3503 | 327399 | A | G |
| 3504 | 327431 | G | A |
| 3505 | 327444 | G | A |
| 3506 | 327488 | T | C |
| 3507 | 327490 | G | T |
| 3508 | 327598 | C | T |
| 3509 | 327625 | A | G |
| 3510 | 327665 | T | C |
| 3511 | 327736 | A | G |
| 3512 | 327877 | C | T |
| 3513 | 327879 | T | C |
| 3514 | 327911 | G | A |
| 3515 | 327962 | G | T |
| 3516 | 328023 | T | G |
| 3517 | 328043 | G | C |
| 3518 | 328067 | G | A |
| 3519 | 328089 | G | A |
| 3520 | 328125 | G | A |
| 3521 | 328198 | A | G |
| 3522 | 328404 | C | T |
| 3523 | 328414 | C | G |
| 3524 | 328598 | G | A |
| 3525 | 328672 | C | T |
| 3526 | 328711 | A | G |
| 3527 | 328892 | A | C |
| 3528 | 328913 | A | G |
| 3529 | 329013 | C | T |
| 3530 | 329042 | C | T |
| 3531 | 329171 | G | A |
| 3532 | 329183 | T | C |
| 3533 | 329210 | T | C |
| 3534 | 329216 | T | C |
| 3535 | 329261 | A | T |
| 3536 | 329396 | A | G |
| 3537 | 329426 | G | C |
| 3538 | 329526 | T | C |
| 3539 | 329534 | T | C |
| 3540 | 329678 | G | A |
| 3541 | 329725 | C | T |
| 3542 | 329795 | G | A |
| 3543 | 329820 | G | T |
| 3544 | 329846 | C | T |
| 3545 | 329854 | A | T |
| 3546 | 329859 | A | G |
| 3547 | 330048 | T | C |
| 3548 | 330075 | A | G |
| 3549 | 330084 | T | A |
| 3550 | 330172 | T | C |
| 3551 | 330339 | A | G |
| 3552 | 330386 | C | T |
| 3553 | 330414 | C | G |
| 3554 | 333419 | G | T |
| 3555 | 333520 | G | A |
| 3556 | 333544 | A | G |
| 3557 | 333594 | C | T |
| 3558 | 333616 | C | T |
| 3559 | 333666 | A | G |
| 3560 | 334066 | C | T |
| 3561 | 334138 | C | T |
| 3562 | 334210 | G | A |
| 3563 | 334247 | C | T |
| 3564 | 334315 | T | C |
| 3565 | 334333 | A | G |
| 3566 | 334364 | A | G |
| 3567 | 334434 | T | G |
| 3568 | 334521 | C | T |
| 3569 | 334655 | A | G |
| 3570 | 334680 | C | A |
| 3571 | 334798 | T | C |
| 3572 | 334829 | C | A |
| 3573 | 334873 | A | G |
| 3574 | 334938 | G | A |
| 3575 | 334972 | T | C |
| 3576 | 335053 | T | A |
| 3577 | 335085 | G | A |
| 3578 | 335202 | G | A |
| 3579 | 335367 | A | C |
| 3580 | 335426 | T | A |
| 3581 | 335435 | A | T |
| 3582 | 335460 | A | G |
| 3583 | 335471 | C | T |
| 3584 | 335499 | T | C |
| 3585 | 335514 | A | G |
| 3586 | 335572 | G | A |
| 3587 | 335642 | C | T |
| 3588 | 335690 | G | A |
| 3589 | 335720 | A | C |
| 3590 | 335765 | T | C |
| 3591 | 335895 | G | T |
| 3592 | 335900 | A | G |
| 3593 | 336015 | T | C |
| 3594 | 336122 | C | T |
| 3595 | 336132 | C | T |
| 3596 | 336454 | A | G |
| 3597 | 336468 | G | A |
| 3598 | 336487 | G | A |
| 3599 | 336596 | G | A |
| 3600 | 336608 | T | C |
| 3601 | 336686 | C | T |
| 3602 | 336694 | T | G |
| 3603 | 336725 | A | G |
| 3604 | 336733 | G | A |
| 3605 | 336865 | C | T |
| 3606 | 336917 | — | G |
| 3607 | 336946 | C | T |
| 3608 | 337076 | C | T |
| 3609 | 337113 | A | T |
| 3610 | 337215 | — | C |
| 3611 | 337295 | G | A |
| 3612 | 337320 | A | C |
| 3613 | 337539 | C | A |
| 3614 | 337635 | A | C |
| 3615 | 337929 | T | C |
| 3616 | 337949 | A | G |
| 3617 | 338017 | G | A |
| 3618 | 338085 | G | A |
| 3619 | 338111 | G | A |
| 3620 | 338132 | A | G |
| 3621 | 338151 | C | T |
| 3622 | 338234 | A | G |
| 3623 | 338256 | A | C |
| 3624 | 338340 | A | G |
| 3625 | 338360 | T | G |
| 3626 | 338400 | G | A |
| 3627 | 338552 | A | G |
| 3628 | 338918 | G | A |
| 3629 | 339098 | — | C |
| 3630 | 339192 | A | G |
| 3631 | 339214 | G | A |
| 3632 | 339227 | G | A |
| 3633 | 339309 | A | G |
| 3634 | 339391 | C | G |
| 3635 | 339532 | T | C |
| 3636 | 339714 | A | G |
| 3637 | 339985 | — | AAT |
| 3638 | 340186 | T | C |
| 3639 | 340731 | G | A |
| 3640 | 341366 | T | C |
| 3641 | 341953 | T | A |
| 3642 | 342028 | G | A |
| 3643 | 342087 | A | T |
| 3644 | 342861 | T | C |
| 3645 | 343102 | G | T |
| 3646 | 343425 | G | A |
| 3647 | 343468 | T | A |
| 3648 | 343475 | G | A |
| 3649 | 343484 | T | A |
| 3650 | 343548 | T | C |
| 3651 | 343866 | A | T |
| 3652 | 344261 | C | T |
| 3653 | 344318 | C | G |
| 3654 | 344545 | A | C |
| 3655 | 344884 | C | T |
| 3656 | 345059 | A | C |

[0092] It is well known in the art that given the sequence and the SNP allele associated with a given trait (e.g. ASR resistance), one having ordinary skill in the art could develop oligonucleotide primers and use said primers to identify plants carrying the chromosomal interval of SEQ ID NO: 1, or a portion thereof. In example embodiments, a TAQMAN® assay (e.g. generally a two-step allelic discrimination assay or similar), a KASP™ assay (generally a one-step allelic discrimination assay defined below or similar), or both can be employed to assay one or more of the SNPs disclosed in Table 1. In an exemplary two-step assay, a forward primer, a reverse primer, and two assay probes (or hybridization oligos) are employed. The forward and reverse primers are employed to amplify genetic loci that comprise SNPs that are associated with ASR resistance loci. The particular nucleotides that are present at the SNP positions are then assayed using the assay primers (which in some embodiments are differentially labeled with, for example, fluorophores to permit distinguishing between the two assay probes in a single reaction), which in each pair differ from each other with respect to the nucleotides that are present at the SNP position (although it is noted that in any given pair, the probes can differ in their 5′ or 3′ ends without impacting their abilities to differentiate between nucleotides present at the corresponding SNP positions). In some embodiments, the assay primers and the reaction conditions are designed such that an assay primer will only hybridize to the reverse complement of a 100% perfectly matched sequence, thereby permitting identification of which allele(s) is/are present based upon detection of hybridizations. Example primers and probes are provided herein with reference to Example 3 and Table 3.

### Genetic Mapping

[0093] Genetic loci correlating with particular phenotypes, such as disease resistance, can be mapped in an organism's genome. By identifying a marker or cluster of markers that co-segregate with a trait of interest, the breeder is able to rapidly select a desired phenotype by selecting for the proper marker (a process called marker-assisted selection, or MAS). Such markers may also be used by breeders to design genotypes in silico and to practice whole genome selection.

[0094] The present invention provides markers associated with enhanced disease resistance. Detection of these markers and/or other linked markers can be used to identify, select and/or produce Disease resistant plants and/or to eliminate plants that are not Disease resistant from breeding programs or planting.

Glycine canescens Genetic Loci Associated with Enhanced Disease Resistance

[0095] Chromosome intervals are provided herein that are associated with enhanced disease resistance. When introgressed into the genome of a plant, the introgressed chromosomal interval confers the plant with enhanced disease resistance. In particular embodiments, the chromosomal interval comprises SEQ ID NO: 1, or a portion thereof. In particular embodiments, the chromosomal interval comprising SEQ ID NO: 1, or a portion thereof, confers enhanced resistance to Asian Soy Rust (ASR). In particular embodiments, the chromosomal interval comprising SEQ ID NO: 1, or a portion thereof, that confers enhanced resistance to Asian Soy Rust (ASR), is derived from Glycine canescens, such as from Glycine canescens Accession line PI446934, or a progeny thereof.

[0096] As used herein, “chromosome interval” designates a contiguous linear span of genomic DNA that resides in planta on a single chromosome. The term also designates any and all genomic intervals defined by any of the markers set forth in this invention. The genetic elements located on a single chromosome interval are physically linked and the size of a chromosome interval is not particularly limited. In some aspects, the genetic elements located within a single chromosome interval are genetically linked, typically with a genetic recombination distance of, for example, less than or equal to 20 cM, less than or equal to 10 cM, or less than or equal to 5 cM. That is, two genetic elements within a single chromosome interval undergo meiotic recombination at a frequency of less than or equal to 20% or 10% or 5%, respectively.

[0097] As used herein, the portion of the chromosomal interval of SEQ ID NO: 1 comprises at least 10%; at least 11%; at least 12%; at least 13%; at least 14%; at least 15%; at least 16%%; at least 17%; at least 18%; at least 19%; at least 20%; at least 21%; at least 22%; at least 23%; at least 24%; at least 25%; at least 26%; at least 27%; at least 28%; at least 29%; at least 30%; at least 31%; at least 32%; at least 33%; at least 34%; at least 35%; at least 36%; at least 37%; at least 38%; a t least 39%; at least 40%; at least 41%; at least 42%; at least 43%; at least 44%; at least 45%; at least 46%; at least %; at least 48%; at least 49%; or at least 50%; at least 51%; at least 52%; at least 53%; at least 54%; at least 55%; at least 56%; at least 57%; at least 58%; at least 59%; or at least 60%; at least 61%; at least 62%; at least 63%; at least 64%; at least 65%; at least 66%; at least 67%; at least 68%; at least 69%; at least 70%; at least 71%; at least 72%; at least 73%; at least 74%; at least 75%; at least 76%; at least 77%; at least 78%; at least 79%; at least 80%; at least 81%; at least 82%; at least 83%; at least 84%; at least 85%; at least 86%; at least 87%; at least 88%; at least 89%; at least 90%; at least 91%; at least 92%; at least 93%; at least 94%; at least 95%; at least 96%; at least 97%; at least 98%; or at least 99% of SEQ ID NO: 1.

[0098] The boundaries of a chromosome interval can be defined by genetic recombination distance or by markers. In one embodiment, the boundaries of a chromosome interval comprise markers. In another embodiment, the boundaries of a chromosome interval comprise markers that are linked to a gene controlling the trait of interest, i.e., any marker that lies within a given interval, including the terminal markers that define the boundaries of the interval, and that can be used as a marker for the presence or absence of disease resistance.

[0099] In particular embodiments, the chromosomal interval that confers enhanced disease resistance (e.g., enhanced ASR resistance) comprises SEQ ID NO: 1, or a portion thereof that is flanked by SNP Marker No. 1850 and SNP Marker No. 3656 of Table 1. In other particular embodiments, the chromosomal interval that confers enhanced ASR resistance comprises SEQ ID NO: 1, or a portion thereof that is flanked by SNP Marker No. 3115 and SNP Marker No. 3347 of Table 1. In still other embodiments, the chromosomal interval comprises SEQ ID NO: 1 or a portion thereof one or more of the favorable markers of Table 1.

[0100] An interval, or portion thereof, described by the markers that flank the interval include the indicated flanking markers and any marker localizing within that interval, whether those markers are currently known or unknown. Although it is anticipated that one skilled in the art may describe additional polymorphic sites at marker loci in and around the markers identified herein, any marker within the chromosome intervals described herein that are associated with disease resistance fall within the scope of this claimed invention. In example embodiments, the chromosomal interval that confers enhanced disease resistance (e.g., enhanced ASR resistance) comprises SEQ ID NO: 1, or a portion of SEQ ID NO: 1 that is flanked by SNP Marker No. 1850 and SNP Marker No. 3656 of Table 1, or a portion of SEQ ID NO: 1 comprising SNP Marker No. 1850 and/or SNP Marker No. 3656 of Table 1, and/or any of the markers located between SNP Marker No. 1850 and SNP Marker No. 3656 of Table 1. In other example embodiments, the chromosomal interval that confers enhanced disease resistance (e.g., enhanced ASR resistance) comprises SEQ ID NO: 1, or a portion of SEQ ID NO: 1 that is flanked by SNP Marker No. 3115 and SNP Marker No. 3347 of Table 1, or a portion of SEQ ID NO: 1 comprising SNP Marker No. 3115 and/or SNP Marker No. 3347 of Table 1, and/or any of the markers located between SNP Marker No. 3115 and SNP Marker No. 3347 of Table 1.

[0101] “Quantitative trait loci” or a “quantitative trait locus” (QTL), as used herein, is a genetic interval that effects a phenotype that can be described in quantitative terms and can be assigned a “phenotypic value” which corresponds to a quantitative value for the phenotypic trait. A QTL can act through a single gene mechanism or by a polygenic mechanism. In some aspects, the invention provides QTL chromosome intervals, where a QTL (or multiple QTLs) that segregates with disease resistance is contained in those intervals. In one embodiment of this invention, the boundaries of chromosome intervals are drawn to encompass markers that will be linked to one or more QTL. In other words, the chromosome interval is drawn such that any marker that lies within that interval (including the terminal markers that define the boundaries of the interval) is genetically linked to the QTL. Each chromosomal interval comprises at least one QTL.

[0102] Markers associated with enhanced disease resistance are identified herein at Table 1. A marker of the present invention may comprise a single allele or a combination of alleles at one or more genetic loci (for example, any combination of markers from Table 1). In particular embodiments, the marker may comprise one or more marker alleles located within a chromosomal interval comprising SEQ ID NO: 1, or a portion thereof, that are associated with ASR resistance, particularly any of the favorable markers of Table 1. In other particular embodiments, the marker may comprise any marker located between position 1 and position 527424 of SEQ ID NO: 1.

[0103] In one example embodiment, the marker of the present invention is SNP marker 1850 of Table 1, or any marker associated with ASR located within 20 cM, 10 cM, 5 cM, 4 cM, 3 cM, 2 cM, 1 cM, 0.5 cM or 0.1 cM of SNP marker 1850 of Table 1. In another example embodiment, the marker of the present invention is SNP marker 3656 of Table 1, or any marker associated with ASR located within 20 cM, 10 cM, 5 cM, 4 cM, 3 cM, 2 cM, 1 cM, 0.5 cM or 0.1 cM of SNP marker 3656 of Table 1. In still another embodiment, the marker of the present invention is any marker associated with the chromosomal interval of SEQ ID NO: 1 that is located between SNP marker 1850 and SNP marker 3656 of Table 1, or any marker located within 20 cM, 10 cM, 5 cM, 4 cM, 3 cM, 2 cM, 1 cM, 0.5 cM or 0.1 cM thereof.

[0104] In other particular embodiments, the marker of the present invention is SNP marker 3115 of Table 1, or any marker associated with ASR located within 20 cM, 10 cM, 5 cM, 4 cM, 3 cM, 2 cM, 1 cM, 0.5 cM or 0.1 cM of SNP marker 3115 of Table 1. In another example embodiment, the marker of the present invention is SNP marker 3347 of Table 1, or any marker associated with ASR located within 20 cM, 10 cM, 5 cM, 4 cM, 3 cM, 2 cM, 1 cM, 0.5 cM or 0.1 cM of SNP marker 3347 of Table 1. In still another embodiment, the marker of the present invention is any marker associated with the chromosomal interval of SEQ ID NO: 1 that is located between SNP marker 3115 and SNP marker 3347 of Table 1, or any marker located within 20 cM, 10 cM, 5 cM, 4 cM, 3 cM, 2 cM, 1 cM, 0.5 cM or 0.1 cM thereof.

[0105] In still further embodiments, the marker of the present invention is a SNP marker located at or between positions 152,261 and 345,059 of SEQ ID NO: 1, such as at or between positions 272,226 and 297,561 of SEQ ID NO: 1. In still other embodiments, the marker of the present invention is any marker associated ASR resistance that is within 20 cM, 10 cM, 5 cM, 4 cM, 3 cM, 2 cM, 1 cM, 0.5 cM or 0.1 cM of a SNP marker located at or between positions 152,261 and 345,059 of SEQ ID NO: 1, such as a SNP marker within 20 cM, 10 cM, 5 cM, 4 cM, 3 cM, 2 cM, 1 cM, 0.5 cM or 0.1 cM of a SNP marker located at or between positions 272,226 and 297,561 of SEQ ID NO: 1.

[0106] Markers of the present invention are described herein with respect to the positions of marker loci within the chromosomal interval comprising sequenced genomic DNA of PI446934, or a progeny thereof as depicted by SEQ ID NO: 1 and as represented in Table 1.

[0107] When referring to marker positions in cM, position zero corresponds to the first (most distal) marker known at the beginning of the chromosome on both Syngenta's internal consensus genetic map and the Williams 82 v2.0 reference genomic map, which is freely available to the public from the soybase(.)org website.

### Marker-Assisted Selection

[0108] Markers can be used in a variety of plant breeding applications. See, e.g., Staub et al., Hortscience 31: 729 (1996); Tanksley, Plant Molecular Biology Reporter 1: 3 (1983). One of the main areas of interest is to increase the efficiency of backcrossing and introgressing genes using marker-assisted selection (MAS). In general, MAS takes advantage of genetic markers that have been identified as having a significant likelihood of co-segregation with a desired trait. Such markers are presumed to be in/near the gene(s) that give rise to the desired phenotype, and their presence indicates that the plant will possess the desired trait. Plants which possess the marker are expected to transfer the desired phenotype to their progeny.

[0109] A marker that demonstrates linkage with a locus affecting a desired phenotypic trait provides a useful tool for the selection of the trait in a plant population. This is particularly true where the phenotype is hard to assay or occurs at a late stage in plant development. Since DNA marker assays are less laborious and take up less physical space than field phenotyping, much larger populations can be assayed, increasing the chances of finding a recombinant with the target segment from the donor line moved to the recipient line. The closer the linkage, the more useful the marker, as recombination is less likely to occur between the marker and the gene causing or imparting the trait. Having flanking markers decreases the chances that false positive selection will occur. The ideal situation is to have a marker within the causative gene itself, so that recombination cannot occur between the marker and the gene. Such a marker is called a “perfect marker.”

[0110] When a gene is introgressed by MAS, it is not only the gene that is introduced but also the flanking regions. Gepts, Crop Sci 42:1780 (2002). This is referred to as “linkage drag.” In the case where the donor plant is highly unrelated to the recipient plant, these flanking regions carry additional genes that may code for agronomically undesirable traits. This “linkage drag” may also result in reduced yield or other negative agronomic characteristics even after multiple cycles of backcrossing into the elite soybean line. This is also sometimes referred to as “yield drag.” The size of the flanking region can be decreased by additional backcrossing, although this is not always successful, as breeders do not have control over the size of the region or the recombination breakpoints. Young et al., Genetics 120:579 (1998). In classical breeding, it is usually only by chance that recombinations that contribute to a reduction in the size of the donor segment are selected. Tanksley et al., Biotechnology 7: 257 (1989). Even after 20 backcrosses, one might find a sizeable piece of the donor chromosome still linked to the gene being selected. With markers, however, it is possible to select those rare individuals that have experienced recombination near the gene of interest. In 150 backcross plants, there is a 95% chance that at least one plant will have experienced a crossover within 1 cM of the gene, based on a single meiosis map distance. Markers allow for unequivocal identification of those individuals. With one additional backcross of 300 plants, there would be a 95% chance of a crossover within 1 cM single meiosis map distance of the other side of the gene, generating a segment around the target gene of less than 2 cM based on a single meiosis map distance. This can be accomplished in two generations with markers, while it would have required on average 100 generations without markers. See Tanksley et al., supra. When the exact location of a gene is known, flanking markers surrounding the gene can be utilized to select for recombinations in different population sizes. For example, in smaller population sizes, recombinations may be expected further away from the gene, so more distal flanking markers would be required to detect the recombination.

[0111] The availability of integrated linkage maps of the soybean genome containing increasing densities of public soybean markers has facilitated soybean genetic mapping and MAS.

[0112] Of all the molecular marker types, SNPs are the most abundant and have the potential to provide the highest genetic map resolution. Bhattramakki et al., Plant Molec. Biol. 48:539 (2002). SNPs can be assayed in a so-called “ultra-high-throughput” fashion because they do not require large amounts of nucleic acid and automation of the assay is straight-forward. SNPs also have the benefit of being relatively low-cost systems. These three factors together make SNPs highly attractive for use in MAS. Several methods are available for SNP genotyping, including but not limited to hybridization, primer extension, oligonucleotide ligation, nuclease cleavage, mini-sequencing and coded spheres. Such methods have been reviewed in various publications: Gut, Hum. Mutat. 17:475 (2001); Shi, Clin. Chem. 47:164 (2001); Kwok, Pharmacogenomics 1:95 (2000); Bhattramakki and Rafalski, Discovery and application of single nucleotide polymorphism markers in plants, in PLANT GENOTYPING: THE DNA FINGERPRINTING OF PLANTS, CABI Publishing, Wallingford (2001). A wide range of commercially available technologies utilize these and other methods to interrogate SNPs, including Masscode™ (Qiagen, Germantown, MD), Invader® (Hologic, Madison, WI), SnapShot® (Applied Biosystems, Foster City, CA), Tagman® (Applied Biosystems, Foster City, CA) and Beadarrays™ (Illumina, San Diego, CA).

[0113] A number of SNP alleles together within a sequence, or across linked sequences, can be used to describe a haplotype for any particular genotype. Ching et al., BMC Genet. 3:19 (2002); Gupta et al., (2001), Rafalski, Plant Sci. 162:329 (2002b). Haplotypes can be more informative than single SNPs and can be more descriptive of any particular genotype. For example, a single SNP may be allele “T” for a specific Disease resistant line or variety, but the allele “T” might also occur in the soybean breeding population being utilized for recurrent parents. In this case, a combination of alleles at linked SNPs may be more informative. Once a unique haplotype has been assigned to a donor chromosomal region, that haplotype can be used in that population or any subset thereof to determine whether an individual has a particular gene. The use of automated high throughput marker detection platforms known to those of ordinary skill in the art makes this process highly efficient and effective.

[0114] The markers of the present invention can be used in marker-assisted selection protocols to identify and/or select progeny with enhanced Asian soybean rust tolerance. Such methods can comprise, consist essentially of or consist of crossing a first soybean plant or germplasm with a second soybean plant or germplasm, wherein the first soybean plant or germplasm comprises, in its genome, a chromosomal interval conferring ASR resistance, the chromosomal interval comprising SEQ ID NO: 1, or a portion thereof, and selecting a progeny plant that possesses a marker associated with the chromosomal interval of SEQ ID NO: 1, or the portion thereof. In particular, the chromosome interval comprises at least one allele as depicted in Table 1 and presence of the chromosomal interval in the progeny plant is detected by detecting for the presence of a favorable allele of any of the markers of Table 1.

[0115] Either of the first and second soybean plants, or both, may be of a non-naturally occurring variety of soybean. In some embodiments, the second soybean plant or germplasm is of an elite variety of soybean. In some embodiments, the genome of the second soybean plant or germplasm is at least about 50%, 55%, 60%, 65%, 70%, 75%, 80%, 85%, 90%, 95%, 97%, 99% or 100% identical to that of an elite variety of soybean.

[0116] Methods for identifying and/or selecting a disease resistant soybean plant or germplasm may comprise, consist essentially of or consist of detecting the presence of a marker associated with enhanced ASR tolerance. The marker may be detected in any sample taken from the plant or germplasm, including, but not limited to, the whole plant or germplasm, a portion of said plant or germplasm (e.g., a seed chip, a leaf punch disk or a cell from said plant or germplasm) or a nucleotide sequence from said plant or germplasm. Such a sample may be taken from the plant or germplasm using any present or future method known in the art, including, but not limited to, automated methods of removing a portion of endosperm with a sharp blade, drilling a small hole in the seed and collecting the resultant powder, cutting the seed with a laser and punching a leaf disk. The soybean plant may be of a non-naturally occurring variety of soybean. In some embodiments, the genome of the soybean plant or germplasm is at least about 50%, 55%, 60%, 65%, 70%, 75%, 80%, 85%, 90%, 95%, 97%, 99% or 100% identical to that of an elite variety of soybean.

[0117] In some embodiments, the marker detected in the sample may comprise, consist essentially of or consist of one or more marker alleles located within the chromosomal interval selected from a chromosomal interval derived from PI446934 or a progeny thereof wherein said chromosomal interval comprises SEQ ID NO: 1; or a portion thereof.

[0118] In example embodiments, methods of identifying and/or selecting plants having enhanced ASR resistance comprise detecting in the genome of a plant, presence of (i) SNP marker 1850 of Table 1, and/or any marker associated with ASR located within 20 cM, 10 cM, 5 cM, 4 cM, 3 cM, 2 cM, 1 cM, 0.5 cM or 0.1 cM of SNP marker 1850 of Table 1; (ii) SNP marker 3656 of Table 1, and/or any marker associated with ASR located within 20 cM, 10 cM, 5 cM, 4 cM, 3 cM, 2 cM, 1 cM, 0.5 cM or 0.1 cM of SNP marker 3656 of Table 1; (iii) at least one SNP marker associated with the chromosomal interval of SEQ ID NO: 1 that is/are located between SNP marker 1850 and SNP marker 3656 of Table 1, and/or any marker located within 20 cM, 10 cM, 5 cM, 4 cM, 3 cM, 2 cM, 1 cM, 0.5 cM or 0.1 cM thereof; (iv) SNP marker 3115 of Table 1, and/or any marker associated with ASR located within 20 cM, 10 cM, 5 cM, 4 cM, 3 cM, 2 cM, 1 cM, 0.5 cM or 0.1 cM of SNP marker 3115 of Table 1; (v) SNP marker 3347 of Table 1, and/or any marker associated with ASR located within 20 cM, 10 cM, 5 cM, 4 cM, 3 cM, 2 cM, 1 cM, 0.5 cM or 0.1 cM of SNP marker 3347 of Table 1; and/or (vi) at least one marker associated with the chromosomal interval of SEQ ID NO: 1 that is located between SNP marker 3115 and SNP marker 3347 of Table 1, and/or any marker located within 20 cM, 10 cM, 5 cM, 4 cM, 3 cM, 2 cM, 1 cM, 0.5 cM or 0.1 cM thereof.

[0119] In still further embodiments, methods of identifying and/or selecting plants having enhanced ASR resistance comprise detecting in the genome of a plant, presence of (i) one or more favorable SNP markers located at or between positions 152,261 and 345,059 of SEQ ID NO: 1; (ii) one or more favorable SNP markers located at or between positions 272,226 and 297,561 of SEQ ID NO: 1; (iii) one or more favorable SNP markers located at or between positions 278,453 and 290,245 of SEQ ID NO: 1; (iv) one or more markers associated ASR resistance that are within 20 cM, 10 cM, 5 cM, 4 cM, 3 cM, 2 cM, 1 cM, 0.5 cM or 0.1 cM of a SNP marker located at or between positions 152,261 and 345,059 of SEQ ID NO: 1; and/or (v) one or more markers associated ASR resistance that are within 20 cM, 10 cM, 5 cM, 4 cM, 3 cM, 2 cM, 1 cM, 0.5 cM or 0.1 cM of a SNP marker located at or between positions 272,226 and 297,561 of SEQ ID NO: 1.

[0120] Methods for producing a disease resistant soybean plant may comprise, consist essentially of or consist of detecting, in a germplasm, a marker associated with enhanced disease resistance (e.g., ASR) wherein said marker is selected from Table 1 or wherein the marker is a closely linked loci of any marker described in Table 1 and producing a soybean plant from said germplasm. The marker may be detected in any sample taken from the germplasm, including, but not limited to, a portion of said germplasm (e.g., a seed chip or leaf punch or a cell from said germplasm) or a nucleotide sequence from said germplasm. Such a sample may be taken from the germplasm using any present or future method known in the art, including, but not limited to, automated methods of removing a portion of endosperm with a sharp blade, drilling a small hole in the seed and collecting the resultant powder, cutting the seed with a laser and punching a leaf disk. The germplasm may be of a non-naturally occurring variety of soybean. In some embodiments, the genome of the germplasm is at least about 50%, 55%, 60%, 65%, 70%, 75%, 80%, 85%, 90%, 95%, 97%, 99% or 100% identical to that of an elite variety of soybean. A Disease resistant soybean plant is then produced from the germplasm identified as having the marker associated with enhanced disease resistance (e.g., ASR) according to methods well known in the art for breeding and producing plants from germplasm.

[0121] In some embodiments, the marker detected in the germplasm may comprise, consist essentially of or consist of one or more marker alleles located within a chromosomal interval derived from PI446934 or a progeny thereof wherein said chromosomal interval corresponds with nucleotide base 1 to 264966 of SEQ ID NO: 1, or a portion thereof. In embodiments, the chromosomal interval associated with ASR resistance that is detected by the marker spans 20 cM, 15 cM, 10 cM, 5 cM, 1 cM, 0.5 cM from a SNP marker that associates with increased ASR resistance in soybean wherein the SNP marker is selected from the group consisting of any SNP marker displayed in Table 1. In embodiments, the chromosomal interval associated with ASR resistance comprises SEQ ID NO: 1 or a portion thereof flanked by SNP Marker No. 1850 and SNP Marker No. 3656 of Table 1. In other particular embodiments, the chromosomal interval that confers enhanced ASR resistance comprises SEQ ID NO: 1, or a portion thereof, that is flanked by SNP Marker No. 3115 and SNP Marker No. 3347 of Table 1. In still other embodiments, the chromosomal interval comprises SEQ ID NO: 1 or a portion thereof and one or more of the favorable markers of Table 1. In some embodiments, the marker detected in the germplasm may comprise, consist essentially of or consist of one or more marker alleles selected from Table 1.

[0122] Methods for producing and/or selecting an Asian soy rust resistant/tolerant soybean plant or germplasm may comprise crossing a first soybean plant or germplasm with a second soybean plant or germplasm, wherein said first soybean plant or germplasm comprises a chromosomal interval comprising SEQ ID NO: 1 or a portion thereof; or a chromosomal interval derived from PI446934, or a progeny thereof, wherein said chromosomal interval corresponds with nucleotide base 1 to 264966 of SEQ ID NO: 1 or a portion thereof; or a chromosomal interval spanning 20 cM, 15 cM, 10 cM, 5 cM, 1 cM, 0.5 cM from a SNP marker that associates with increased ASR resistance in soybean wherein the SNP marker is selected from the group consisting of any favorable SNP marker of Table 1.

[0123] In some embodiments, the chromosomal interval of SEQ ID NO: 1, or a portion thereof, may be introduced through a cis-genic approach.

[0124] Also provided herein are methods of introgressing an allele associated with enhanced disease or pathogen resistance (e.g., enhanced resistance to ASR, SCN, SDS, RKN, Phytopthora, etc.) into a soybean plant. Such methods for introgressing an allele associated with enhanced disease (e.g. ASR, SCN, SDS, RKN, Phytopthora, etc.) resistance/tolerance into a soybean plant or germplasm may comprise, consist essentially of or consist of crossing a first soybean plant or germplasm comprising said allele (the donor) wherein said allele is selected from any favorable allele listed in Table 1, or a marker closely linked to a marker listed in Table 1, with a second soybean plant or germplasm that lacks said allele (the recurrent parent) and repeatedly backcrossing progeny comprising said allele with the recurrent parent. Progeny comprising said allele may be identified by detecting, in their genomes, the presence of a marker associated with the enhanced disease or pathogen resistance. The marker may be detected in any sample taken from the progeny, including, but not limited to, a portion of said progeny (e.g., a seed chip, a leaf punch disk or a cell from said plant or germplasm) or a nucleotide sequence from said progeny. Such a sample may be taken from the progeny using any present or future method known in the art, including, but not limited to, automated methods of removing a portion of endosperm with a sharp blade, drilling a small hole in the seed and collecting the resultant powder, cutting the seed with a laser and punching a leaf disk. Either the donor or the recurrent parent, or both, may be of a non-naturally occurring variety of soybean. In some embodiments, the recurrent parent is of an elite variety of soybean. In some embodiments, the genome of the recurrent parent is at least about 50%, 55%, 60%, 65%, 70%, 75%, 80%, 85%, 90%, 95%, 97%, 99% or 100% identical to that of an elite variety of soybean.

[0125] In some embodiments, the marker used to identify progeny comprising an allele associated with enhanced disease (e.g., ASR, SCN, SDS, RKN, Phytopthora, brown stem rot etc.) resistance may comprise, consist essentially of or consist of one or more marker alleles located within the chromosomal interval of SEQ ID NO: 1, or a portion thereof; or a chromosomal interval derived from PI446934 or a progeny thereof wherein said chromosomal interval corresponds with nucleotide base 1 to 264966 of SEQ ID NO: 1, or a portion thereof; or a chromosomal interval spanning 20 cM, 15 cM, 10 cM, 5 cM, 1 cM, 0.5 cM from a SNP marker that associates with increased ASR resistance in soybean wherein the SNP marker is any SNP marker of Table 1.

[0126] In some embodiments, the marker may comprise, consist essentially of or consist of marker alleles located in at least two different locations of the chromosomal interval of SEQ ID NO: 1, or a portion thereof. For example, the marker may comprise one or more alleles located in the chromosomal interval defined by and including any two markers in Table 1. In example embodiments, the marker may comprise one or more alleles located at or between positions 1 and ??? of SEQ ID NO: 1; one or more alleles located between positions 152,261 and 345,059 of SEQ ID NO: 1; or one or more alleles located at or between positions 272,226 and 297,561 of SEQ ID NO: 1; and/or a combination thereof, such as a first allele located at or between positions 152,261 and 345,059 of SEQ ID NO: 1 and a second allele located at or between positions 272,226 and 297,561 of SEQ ID NO: 1.

[0127] In some embodiments, a method for producing a Glycine max plant having increased resistance to ASR is provided, the method comprising the steps of:
[0128] a. Providing a Glycine canescens plant line, or progeny thereof comprising a chromosomal interval corresponding to SEQ ID NO: 1, or a portion thereof;
[0129] b. Carrying out embryo rescue (as described in U.S. Pat. No. 7,842,850 or transgenically);
[0130] c. Collecting the seeds resulting from the method of b)
[0131] d. Regenerating the seeds of c) into plants.

[0132] In some embodiments, the Glycine canescens plant line of a) is PI446934, or a progeny thereof.

[0133] In still further embodiments, a method of identifying or selecting a soybean plant having a ASR resistance allele derived from Glycine canescens is provided, the method comprising the steps of:
[0134] a. Isolating a nucleic acid from a soybean plant;
[0135] b. Detecting in the nucleic acid the presence of a molecular marker that associates with increased ASR resistance wherein the molecular marker is any marker provided in Table 1, or wherein the molecular marker is a marker located within 20 cM, 10 cM, 5 cM, 1 cM, or 0.5 cM of any marker provided in Table 1; and
[0136] c. thereby identifying or selecting a soybean plant having a ASR resistance allele derived from Glycine canescens.

### Disease Resistant Soybean Plants and Germplasms

[0137] The present invention provides Disease resistant soybean plants and germplasms. As discussed above, the methods of the present invention may be utilized to identify, produce and/or select a disease resistant soybean plant or germplasm (for example a soybean plant resistant or having increased tolerance to Asian Soybean Rust). In addition to the methods described above, a disease resistant soybean plant or germplasm may be produced by any method whereby a marker associated with enhanced Disease tolerance is introduced into the soybean plant or germplasm, including, but not limited to, transformation, protoplast transformation or fusion, a double haploid technique, embryo rescue, gene editing and/or by any other nucleic acid transfer system.

[0138] In some embodiments, the soybean plant or germplasm comprises a non-naturally occurring variety of soybean. In some embodiments, the soybean plant or germplasm is at least about 50%, 55%, 60%, 65%, 70%, 75%, 80%, 85%, 90%, 95%, 97%, 99% or 100% identical to that of an elite variety of soybean.

[0139] The disease resistant soybean plant or germplasm may be the progeny of a cross between an elite variety of soybean and a variety of soybean that comprises an allele associated with enhanced Disease tolerance (e.g., ASR) wherein the allele is within a chromosomal interval comprising SEQ ID No: 1, or a portion thereof, or a chromosomal interval derived from PI446934, or a progeny thereof wherein said chromosomal interval corresponds with nucleotide base 1 to 264966 of SEQ ID NO: 1 or a portion thereof; or a chromosomal interval comprising at least one favorable SNP marker of Table 1; or a chromosomal interval spanning 20 cM, 15 cM, 10 cM, 5 cM, 1 cM, 0.5 cM from a SNP marker that associates with increased ASR resistance in soybean wherein the SNP marker is any SNP marker of Table 1.

[0140] The Disease resistant soybean plant or germplasm may be the progeny of an introgression wherein the recurrent parent is an elite variety of soybean and the donor comprises an allele associated with enhanced Disease tolerance and/or resistance wherein the donor carries a chromosomal interval comprising SEQ ID NO: 1 or a portion thereof and wherein the chromosome interval comprises at least one favorable allele selected from Table 1.

[0141] The Disease resistant soybean plant or germplasm may be the progeny of a cross between a first elite variety of soybean (e.g., a tester line) and the progeny of a cross between a second elite variety of soybean (e.g., a recurrent parent) and a variety of soybean that comprises an allele associated with enhanced ASR tolerance (e.g., a donor).

[0142] The Disease resistant soybean plant or germplasm may be the progeny of a cross between a first elite variety of soybean and the progeny of an introgression wherein the recurrent parent is a second elite variety of soybean and the donor comprises an allele associated with enhanced ASR tolerance.

[0143] A Disease resistant soybean plant and germplasm of the present invention may comprise one or more markers of the present invention (e.g., one or more of the markers described in Table 1; or any marker in close proximity thereto).

[0144] In some embodiments, the Disease resistant soybean plant or germplasm may comprise within its genome, a marker associated with enhanced ASR tolerance, wherein said marker is located within the chromosomal interval of SEQ ID NO: 1; or is a SNP marker of Table 1; or is a marker that lies within a chromosomal interval spanning 20 cM, 15 cM, 10 cM, 5 cM, 1 cM, 0.5 cM from a SNP marker that associates with increased ASR resistance in soybean wherein the SNP marker is selected from the group of SNP markers displayed in Table 1.

[0145] In some embodiments, the Disease resistant soybean plant or germplasm may comprise within its genome a marker that comprises, consists essentially of or consists of marker alleles located in at least two different chromosomal intervals. For example, the marker may comprise one or more alleles located in the chromosomal interval defined by and including any combination of two markers of Table 1.

[0146] In some embodiments, the disease resistant plant or germplasm is an elite Glycine max plant having introduced into its genome SEQ ID NO: 1, or a portion thereof, and exhibiting increased Asian soy rust (ASR) resistance as compared to a control plant. As non-limiting examples, the genome may comprise one of at least 10%, at least 11%, at least 12%, at least 13%, at least 14%, at least 15%, at least 16%, at least 17%, at least 18%, at least 19%, and at least 20%, at least 21%, at least 22%, at least 23%, at least 24%, at least 25%, at least 26%, at least 27%, at least 28%, at least 29%, and at least 30% of SEQ ID NO: 1. In some embodiments, SEQ ID NO: 1, or the portion thereof, includes a chromosomal interval from Glycine canescens accession line PI446934, or a progeny thereof, and wherein the control plant does not comprise SEQ ID NO: 1, or a portion thereof in its genome. In some embodiments, SEQ ID NO: 1, or a portion thereof, is obtained from Glycine canescens through the use of chromosome doubling, as is known in the art. In some embodiments, SEQ ID NO: 1, or a portion thereof, comprises a SNP marker associated with increased ASR resistance, wherein said SNP marker corresponds with any one of the favorable SNP markers as listed in Table 1. In some embodiments, SEQ ID NO: 1, or a portion of either, corresponds to a position within the Glycine canescens genome and is derived from Glycine canescens chromosome 1, 2, 3, 4, 5, 6, 7, 8, 9, 10, 11, 12, 13, 14, 15, 16, 17, 18, 19, or 20. In one example embodiment, SEQ ID NO: 1, or the portion thereof, corresponds to a position within the Glycine canescens genome and is derived from Glycine canescens chromosome 3. In some embodiments, the plant further shows resistance to any one of the stresses selected from: diseases (such as powdery mildew, Pythium ultimum, Phytophthora root rot, leaf spot, blast, brown spot, root-knot nematode, soybean cyst nematode, soybean vein necrosis virus, soybean stem canker, soybean sudden death syndrome, leaf and neck blast, rust, frogeye leaf spot, brown stem rot, Fusarium, or sheath blight); insect pests (such as whitefly, aphid, grey field slug, sugarcane borer, green bug, or aphid); and abiotic stress (such as drought tolerance, flooding, high level of salinity, heavy metal, aluminum, manganese, cadmium, zinc, UV-B, boron, iron deficiency chlorosis or cold tolerance (i.e. extreme temperatures)).

[0147] In some embodiments, the disease resistant plant is a plant of the species Glycine max, wherein a portion of a genome of the plant is obtained from a wild glycine species through the use of one of:
[0148] a) chemically induced chromosome doubling; and
[0149] b) introgression of a chromosomal interval comprising SEQ ID NO: 1, or a portion thereof.

### Disease Resistant Soybean Seeds

[0150] The present invention provides Disease resistant soybean seeds. As discussed above, the methods of the present invention may be utilized to identify, produce and/or select a Disease resistant soybean seed. In addition to the methods described above, a Disease resistant soybean seed may be produced by any method whereby a marker associated with enhanced ASR tolerance is introduced into the soybean seed, including, but not limited to, transformation, protoplast transformation or fusion, a double haploid technique, embryo rescue, genetic editing (e.g., CRISPR or TALEN or MegaNucleases) and/or by any other nucleic acid transfer system.

[0151] In some embodiments, the Disease resistant soybean seed comprises a non-naturally occurring variety of soybean. In some embodiments, the soybean seed is at least about 50%, 55%, 60%, 65%, 70%, 75%, 80%, 85%, 90%, 95%, 97%, 99% or 100% identical to that of an elite variety of soybean.

[0152] The Disease resistant soybean seed may be produced by a Disease resistant soybean plant identified, produced or selected by the methods of the present invention. In some embodiments, the Disease resistant soybean seed is produced by a Disease resistant soybean plant of the present invention.

[0153] A disease resistant soybean seed of the present invention may comprise within its genome SEQ ID NO: 1, or a portion thereof, wherein a plant produced by growing the seed exhibits increased Asian soy rust (ASR) resistance. As non-limiting examples, the genome of the seed may comprise one of at least 10%, at least 11%, at least 12%, at least 13%, at least 14%, at least 15%, at least 16%, at least 17%, at least 18%, at least 19%, and at least 20%, at least 21%, at least 22%, at least 23%, at least 24%, at least 25%, at least 26%, at least 27%, at least 28%, at least 29%, and at least 30% of SEQ ID NO: 1.

[0154] A disease resistant soybean seed of the present invention may comprise one or more markers from Table 1 of the present invention.

[0155] In some embodiments, the Disease resistant soybean seed may comprise within its genome, a marker associated with enhanced ASR tolerance, wherein said marker is located within a chromosomal interval comprising SEQ ID NO: 1, or a portion thereof. In embodiments, the marker is any SNP marker of Table 1 that associates with increased ASR resistance in soybean.

### NON-LIMITING EMBODIMENTS

[0156] Non-limiting embodiments include:

[0157] Non-limiting embodiments of plants having increased disease resistance:
[0158] 1. An elite Glycine max plant having introgressed into its genome a chromosomal interval comprising the nucleotide sequence of SEQ ID NO: 1, or a portion thereof, wherein the plant exhibits increased resistance to Asian Soy Rust (ASR) as compared to a control plant not comprising the chromosomal interval or portion thereof.
[0159] 2. The plant of embodiment 1, wherein the portion of the chromosomal interval of SEQ ID NO: 1 comprises at least 10%; at least 11%; at least 12%; at least 13%; at least 14%; at least 15%; at least 16%%; at least 17%; at least 18%; at least 19%; at least 20%; at least 21%; at least 22%; at least 23%; at least 24%; at least 25%; at least 26%; at least 27%; at least 28%; at least 29%; at least 30%; at least 31%; at least 32%; at least 33%; at least 34%; at least 35%; at least 36%; at least 37%; at least 38%; at least 39%; at least 40%; at least 41%; at least 42%; at least 43%; at least 44%; at least 45%; at least 46%; at least %; at least 48%; at least 49%; or at least 50%; at least 51%; at least 52%; at least 53%; at least 54%; at least 55%; at least 56%; at least 57%; at least 58%; at least 59%; or at least 60%; at least 61%; at least 62%; at least 63%; at least 64%; at least 65%; at least 66%; at least 67%; at least 68%; at least 69%; at least 70%; at least 71%; at least 72%; at least 73%; at least 74%; at least 75%; at least 76%; at least 77%; at least 78%; at least 79%; at least 80%; at least 81%; at least 82%; at least 83%; at least 84%; at least 85%; at least 86%; at least 87%; at least 88%; at least 89%; at least 90%; at least 91%; at least 92%; at least 93%; at least 94%; at least 95%; at least 96%; at least 97%; at least 98%; or at least 99% of SEQ ID NO: 1.
[0160] 3. The plant of any one of embodiments 1-2, wherein the chromosomal interval of SEQ ID NO: 1, or the portion thereof, is from the genome of Glycine canescens accession line PI446934, or a progeny thereof.
[0161] 4. The plant of any of embodiments 1-3, wherein the chromosomal interval comprising SEQ ID NO: 1 or a portion thereof comprises a SNP marker associated with increased ASR resistance, wherein said SNP marker corresponds with any one of the favorable SNP markers as listed in Table 1.
[0162] 5. The plant of any of embodiments 1-5, wherein the nucleotide sequence comprising SEQ ID NO: 1 or the portion of either corresponds to a position within the Glycine canescens genome and is derived from Glycine canescens chromosome 1, 2, 3, 4, 5, 6, 7, 8, 9, 10, 11, 12, 13, 14, 15, 16, 17, 18, 19, or 20.
[0163] 6. The plant of embodiment 6, wherein the nucleotide sequence comprising SEQ ID NO: 1 or the portion of either is derived from Glycine canescens chromosome 3.
[0164] 7. A progeny plant or seed of any of embodiments 1-6.
[0165] 8. A plant cell or plant part derived from the plant of any of embodiments 1-7.
[0166] 9. The plant of any one of embodiments 1-8, wherein the plant further shows resistance to any one of the stresses selected from:
   [0167] (a) diseases including powdery mildew, Pythium ultimum, Phytophthora root rot, leaf spot, blast, brown spot, root-knot nematode, soybean cyst nematode, soybean vein necrosis virus, soybean stem canker, soybean sudden death syndrome, leaf and neck blast, rust, frogeye leaf spot, brown stem rot, Fusarium, or sheath blight;
   [0168] (b) insect pests including whitefly, aphid, grey field slug, sugarcane borer, green bug, or aphid;
   [0169] (c) abiotic stress including drought tolerance, flooding, high level of salinity, heavy metal, aluminum, manganese, cadmium, zinc, UV-B, boron, iron deficiency chlorosis or cold tolerance.
[0170] 10. An elite soybean plant comprising an ASR resistance allele which confers the plant with increased resistance to ASR, and wherein the ASR allele comprises at least one single nucleotide polymorphism (SNP) selected from the group of “favorable” SNPs described in any one of Table 1.
[0171] 11. An elite soybean plant comprising a chromosomal interval derived from Glycine canescens and comprising at least one favorable SNP marker selected from any one of Table 1.
[0172] 12. The plant of embodiment 10, wherein the Glycine canescens is accession line PI446934 or a progeny thereof.
[0173] 13. An elite Glycine max plant having introduced into its genome SEQ ID NO: 1 or a portion thereof, and exhibiting increased Asian soy rust (ASR) resistance as compared to a control plant, wherein SEQ ID NO: 1, or a portion thereof is introduced into its genome through the use of introgression of a chromosomal interval comprising SEQ ID NO: 1, or a portion of either, from a wild glycine species and/or chemically induced chromosome doubling.
[0174] 14. The elite Glycine max plant of embodiment 13, wherein the chromosomal interval is introduced from a Glycine canescens plant line.
[0175] 15. The elite Glycine max plant of embodiment 14, wherein the Glycine canescens plant line is accession line PI446934, or a progeny thereof.
[0176] 16. The elite Glycine max plant of any of embodiments 13-15, wherein the chromosomal interval is introduced from chromosome 1, 2, 3, 4, 5, 6, 7, 8, 9, 10, 11, 12, 13, 14, 15, 16, 17, 18, 19, or 20 of Glycine canescens.
[0177] 17. The elite Glycine max plant of embodiment 16, wherein the chromosomal interval is introduced from chromosome 3 of Glycine canescens.
[0178] 18. The elite Glycine max plant of any of embodiments 13-17 wherein SEQ ID NO: 1, or a portion thereof, comprises a SNP marker associated with increased ASR resistance, wherein said SNP marker corresponds with any one of the favorable SNP markers as listed in Table 1.
[0179] 19. The elite Glycine max plant of any of embodiments 17-22, wherein the chromosomal interval comprises at least 10%; at least 11%; at least 12%; at least 13%; at least 14%; at least 15%; at least 16%%; at least 17%; at least 18%; at least 19%; at least 20%; at least 21%; at least 22%; at least 23%; at least 24%; at least 25%; at least 26%; at least 27%; at least 28%; at least 29%; at least 30%; at least 31%; at least 32%; at least 33%; at least 34%; at least 35%; at least 36%; at least 37%; at least 38%; at least 39%; at least 40%; at least 41%; at least 42%; at least 43%; at least 44%; at least 45%; at least 46%; at least 47%; at least 48%; at least 49%; or at least 50%; at least 51%; at least 52%; at least 53%; at least 54%; at least 55%; at least 56%; at least 57%; at least 58%; at least 59%; or at least 60%; at least 61%; at least 62%; at least 63%; at least 64%; at least 65%; at least 66%; at least 67%; at least 68%; at least 69%; at least 70%; at least 71%; at least 72%; at least 73%; at least 74%; at least 75%; at least 76%; at least 77%; at least 78%; at least 79%; at least 80%; at least 81%; at least 82%; at least 83%; at least 84%; at least 85%; at least 86%; at least 87%; at least 88%; at least 89%; at least 90%; at least 91%; at least 92%; at least 93%; at least 94%; at least 95%; at least 96%; at least 97%; at least 98%; or at least 99% of SEQ ID NO: 1.
[0180] 20. A progeny plant or seed of any of embodiments 13-19.
[0181] 21. A plant cell or plant part derived from the plant of any of embodiments 13-20.

[0182] Non-limiting embodiments of methods for producing, selecting, and/or detecting plants having increased disease resistance:
[0183] 22. A method for producing a Glycine max plant having increased resistance to ASR, the method comprising the steps of:
   [0184] a. Providing a Glycine canescens plant line, or progeny thereof comprising a chromosomal interval corresponding to SEQ ID NO: 1;
   [0185] b. Carrying out the embryo rescue method essentially as described in Example 4 or as described in U.S. Pat. No. 7,842,850, or transgenically;
   [0186] c. Collecting the seeds resulting from the method of b)
   [0187] d. Regenerating the seeds of c) into plants.
[0188] 23. The method of embodiment 22, wherein the Glycine canescens plant line of a) is accession line PI446934 or a progeny thereof.
[0189] 24. A method of identifying or selecting a soybean plant having a ASR resistance allele derived from Glycine canescens, the method comprising the steps of:
   [0190] a. Isolating a nucleic acid from a soybean plant;
   [0191] b. Detecting in the nucleic acid the presence of a molecular marker that associates with increased ASR resistance wherein the molecular marker is located within 20 cM, 10 cM, 5 cM, 1 cM, 0.5 cM of a marker as described in Table 1; and
   [0192] c. Thereby identifying or selecting a soybean plant having a ASR resistance allele derived from Glycine canescens.

### EXAMPLES

[0193] The following examples are not intended to be a detailed catalog of all the different ways in which the present invention may be implemented or of all the features that may be added to the present invention. Persons skilled in the art will appreciate that numerous variations and additions to the various embodiments may be made without departing from the present invention. Hence, the following descriptions are intended to illustrate some particular embodiments of the invention, and not to exhaustively specify all permutations, combinations and variations thereof.

### Example 1 Identification of ASR Resistant Wild Glycine Line

[0194] Wild glycine lines, including G. canescens PI446934 and PI505154, were evaluated for rust resistance against sixteen rust strains collected across a diverse range of environments (FIG. 1). The rust data were generated using single pustule derived isolates from USDA-ARS (FL Q09, FL Q12, LABR13, FLQ11) and field populations (FL Q15, NC06, Vero, GLC15, UBL, BR south and BR central), the screening was carried out in contained facilities (FL Q09, FL Q12, LABR13, FLQ11, FL Q15, NC06, Vero, GLC15, UBL, BR South, BR central). The wild glycine lines were evaluated over a multiple day course of infection and rated at various time points. The rating and evaluation were performed using methods well known in the art, based upon Burdon and Speer (Euphytica, 33: 891-896, 1984; also TAG, 1984). An example rating table is shown in FIG. 2. The accession lines were screened >2 times with ˜4 plants each time in North & South America using the large diverse panel of rust isolates.

### Example 2 Allele Mining & Associations to PI446934 ASR Loci

[0195] The resistant parent was crossed to a susceptible G. canescens line and an F1 plant was generated (See Table 2). The F1 plant was self-fertilized and F2 seed was harvested from the selfed F1 plant. Around 200 F2 seed were sown and leaf tissue from each plant was collected for DNA preparations and then the plants were inoculated with Phakopsora pachyrhizi to determine the resistance/susceptible phenotype of each F2 individual. Tissue from 50 resistant F2s and 50 susceptible F2s were combined in separate pools and genomic DNA was prepared from each pool. Illumina sequencing libraries were prepared from DNA for each of the pools and each library was sequenced in two Illumina HiSeq2000 2×100 bp Paired-End (PE) lanes. The average yield per sample was 383 million read pairs, which equals 77 gigabases of sequence per library. The sequencing reads were trimmed to remove bases with PHRED quality scores of <15.

[0196] Quality trimmed reads were aligned to an internal PI446934 reference genome sequence using GSNAP (WU and NACU 2010) as paired-end fragments. If a pair of reads could not be aligned together, they were treated as singletons for alignment. Reads were used in subsequent analyses if they mapped uniquely to the reference (≤2 mismatches every 36 bp and less than 5 bases for every 75 bp as tails).

[0197] SNPs were filtered prior to BSA analysis based on read depth, with SNPs having between 40 and 200× read depth being retained. A Chi-square test was used to select SNPs with significantly different read counts between the two alleles in the two pools. An empirical Bayesian approach (LIU et al. 2012) was used to estimate the conditional probability that there is no recombination between each SNP marker and the causal locus in both the resistant pool and in the susceptible pool. The probability of the linkage between the SNP and the causal gene is the geometric mean of these two conditional probabilities. Around 1000 SNPs were found to have possible linkage to the target locus. A subset of these putatively linked SNPs was used to fine map the locus using phenotyped F2 individuals (Liu, S., C.-T. Yeh, H. M. Tang, D. Nettleton and P. S. Schnable, 2012 Gene Mapping via Bulked Segregant RNA-Seq (BSR-Seq). PLoS ONE 7: e36406 & Wu, T. D., and S. Nacu, 2010 Fast and SNP-tolerant detection of complex variants and splicing in short reads. Bioinformatics 26: 873-881).

TABLE 2
Plant Crossings & Study Type

| | | | | F2: Resistant |
|---|---|---|---|---|
| | PI# (male, | PI # (female, | Study | to Susceptible |
| Species | resistant) | susceptible) | Type | Ratio |
| G. canescens | PI 446934 | PI 505154 | BSA | 3:01 |
| G. canescens | PI 446934 | PI 505154 | BSR + DEG | 3:01 |
| G. canescens | PI 446934 | PI 505154 | Indexing | 3:01 |

[0198] Chromosome discovery for causal loci in the tetraploid soybean population, PI446934 was carried out using Data2Bio's Genomic Bulked Segregant Analysis (gBSA) technology. Data2Bio generated two libraries from RNA samples extracted from one susceptible tissue pool and one resistant tissue pool. After various filtering steps, informative SNPs were identified based on the internal PI446934 genome and Williams 82 public genome. A Bayesian approach was then used to calculate trait-associated probabilities. Next, a physical map of trait-associated SNPs on the identified contigs was created. One contig, Scaffold 000454F (SEQ ID NO: 1), showed a high density of SNPs associated with ASR resistance, as shown in FIGS. 3-6. The context sequences associated with these SNPs were also aligned to the publicly available G. max genome (Williams 82 v2.0 from soybase(.)org) to create a chromosome-level understanding of the mapping interval. The chromosomal positions of the trait-associated SNPs were then displayed graphically. Most of the SNPs from the mapping interval clustered on a small region of chromosome 3 (see FIGS. 3-6).

### Example 3: Fine-Mapping of an ASR Resistance QTL on Chromosome 3

[0199] F1 lines from pedigree PI505154/PI446934 were selected, self-crossed, and harvested. Recombinants at the F2 generation from pedigree PI505154/PI446934 were screened using a set of 150 TaqMan assays targeted to the region of interest on as well as surrounding regions on Chromosome 3. Those plants showing recombinations in the region of interest based on the subset of 41 SNP assays (Tables 3 and 4) with good segregation patterns were phenotyped using rust isolates and their rust reaction compared with expectations based on their inferred parental haplotypes. Those plants passing this test were then sequenced using ˜5× Illumina short reads to get finer detail on their recombination location. Also, F2:3 selfed progeny of each sequenced F2 plant were screened for rust reaction, to allow determination of rust reaction as homozygous resistant, segregating, or homozygous susceptible.

[0200] In particular, given the sequence of the reference genome and the SNP allele associated with ASR resistance, oligonucleotide primers were developed and used to assay for the SNP. In an exemplary two-step assay, a forward primer, a reverse primer, and two assay probes (or hybridization oligos) are employed. The forward and reverse primers are employed to amplify genetic loci that comprise SNPs that are associated with ASR resistance loci. The particular nucleotides that are present at the SNP positions are then assayed using the assay primers, which in example embodiments are differentially labeled with fluorophores to permit distinction between the two assay probes in a single reaction.

[0201] Table 3 provides a list of example assay IDs, wherein each assay ID corresponds to a particular SNP position within the chromosomal interval represented by SEQ ID NO: 1. The assays are designed to differentiate between favorable and unfavorable alleles associated with a given SNP position, as indicated.

[0202] Table 4 provides a list and sequence of the assay components used in each of the assays listed in Table 3. Particularly, Table 4 lists the target sequence amplified to identify the SNP, sequences of the specific forward and reverse primers, as well as the sequence and combination of fluorophores used for each of the assays. In the listing of the assay components, the assay component ID indicates the associated assay ID (Table 3) and the nature of the component (whether it is a probe or a primer). The suffix F1 indicates that the corresponding sequence is for a forward primer, the suffix R1 indicates that the corresponding sequence is for a reverse primer, the suffix FM indicates that the corresponding sequence is for an assay probe having the FAM fluorophore, and the suffix TT indicates that the corresponding sequence is for an assay probe having the TET fluorophore. For example, “S2109FM”, “S2109TT”, “S2109F1” and “S2109R1” refer, respectively, to the FAM probe, TET probe, forward primer, and reverse primer for Assay ID S2109 used for identification of the allele corresponding to SNP ID No. 3006 of Table 1 and 3, which is the SNP at position 266523 of SEQ ID NO: 1. The target sequence amplified is SEQ ID NO: XX.

[0203] One of skill in the art will recognize that sequences to either side of the given primers can be used in place of the given primers, so long as the primers can amplify a region that includes the allele to be detected. The precise probe used for detection can vary, e.g., any probe that can identify the region of a marker amplicon to be detected can be substituted for those probes exemplified herein. Configuration of the amplification primers and detection probes can also be varied. Thus, the invention is not limited to the primers, probes, or marker sequences specifically recited herein.

TABLE 3
Assays associated with SNP positions within SEQ ID NO:
1 that are associated with increased resistance to ASR

| Position | | | Favorable | Unfavorable |
|---|---|---|---|---|
| within SEQ | SNP ID in | | Allele (Rust | allele (Rust |
| ID NO: 1 | Table 1 | Assay ID | Resistant) | Susceptible) |
| 38036 | | S21188 | T | C |
| 38603 | | S21231 | G | C |
| 43041 | | S21220 | A | G |
| 68515 | | S21217 | T | G |
| 69709 | | S21243 | A | G |
| 111190 | | S2144 | A | G |
| 152839 | 1856 | S21196 | T | C |
| 153137 | 1859 | S21242 | A | G |
| 163395 | 1909 | S21205 | G | A |
| 259760 | 2912 | S21210 | C | T |
| 260225 | 2916 | S21232 | G | A |
| 261570 | 2941 | S21239 | G | A |
| 263015 | 2957 | S21212 | G | A |
| 264592 | 2982 | S21206 | A | C |
| 265945 | 2992 | S21228 | C | T |
| 266523 | 3006 | S2109 | C | T |
| 272005 | 3111 | S21215 | A | G |
| 273806 | 3145 | S21237 | C | T |
| 277008 | 3204 | S2187 | A | T |
| 292971 | 3332 | S21198 | A | C |
| 296832 | 3344 | S21208 | C | A |
| 307547 | 3375 | S21181 | A | T |
| 308028 | 3382 | S21184 | G | T |
| 310922 | 3413 | S21227 | C | A |
| 314305 | 3434 | S21229 | G | C |
| 319546 | 3461 | S21234 | G | A |
| 322998 | 3476 | S21178 | T | G |
| 350762 | | S21194 | C | A |
| 351819 | | S21187 | T | C |
| 352378 | | S21219 | A | G |
| 356512 | | S21195 | T | A |
| 356803 | | S21185 | G | C |
| 365615 | | S21233 | T | A |
| 370711 | | S21235 | G | A |
| 376950 | | S21244 | T | C |
| 377789 | | S21197 | A | G |
| 389946 | | S256 | T | C |
| 415434 | | S21213 | A | G |
| 416589 | | S21238 | G | A |
| 418116 | | S21214 | T | C |
| 493279 | | S21191 | A | G |
| 495329 | | S21203 | G | A |
| 503769 | | S21204 | C | A |
| 507251 | | S21224 | G | A |
| 508264 | | S21189 | G | T |

TABLE 4
Sequences of assay components used in assays associated with SNP positions
within SEQ ID NO: 1. Suffix “F1” refers to a forward primer; Suffix “R1” refers to a
reverse primer. Primers with a common prefix can form a primer pair. Suffix FM and TT
refer to probes.

| | | | | Assay | | |
|---|---|---|---|---|---|---|
| | Assay | Assay | Assay | component | | |
| Assay | Target | Component | Component | SEQ ID | | |
| ID | Sequence | Name | Sequence | NO: | Flurophore | |
| S2109 | SEQ ID NO: | S2109A1FM | TTAACGTTCCAA | 3 | FAM | A |
| | 2 | | AAACC | | | |
| S2109 | | S2109A2TT | TAACGTTCCAGA | 4 | TET | G |
| | | | AACC | | | |
| S2109 | | S2109F1 | GACACCTAGCCC | 5 | | |
| | | | ATGTCAAA | | | |
| S2109 | | S2109R1 | CATGTTGGTTCA | 6 | | |
| | | | GATTCCTATTTA | | | |
| | | | TTCC | | | |
| S21178 | SEQ ID NO: | S21178A1FM | ACGTCCCTCGAA | 8 | FAM | C |
| | 7 | | CCAG | | | |
| S21178 | | S21178A2TT | AAACGTCCCTCT | 9 | TET | A |
| | | | AACCAGT | | | |
| S21178 | | S21178F1 | TGATGAATGGC | 10 | | |
| | | | AGTGTGAAACCT | | | |
| S21178 | | S21178R1 | ACCAGAGAGTTT | 11 | | |
| | | | AGAGCTGCATA | | | |
| S21181 | SEQ ID NO: | S21181A1FM | TGCCATAAATTG | 13 | FAM | T |
| | 12 | | TCATTTAAA | | | |
| S21181 | | S21181A2TT | TGCCATAAATTG | 14 | TET | A |
| | | | TCTTTTAAA | | | |
| S21181 | | S21181F1 | TTTCTGGTCCCT | 15 | | |
| | | | ACCATTAGGTTA | | | |
| S21181 | | S21181R1 | TGTTGGTGTGCC | 16 | | |
| | | | TCAATGAAG | | | |
| S21184 | SEQ ID NO: | S21184A1FM | TTCTGAAGTTTT | 18 | FAM | C |
| | 17 | | GTGGGAAC | | | |
| S21184 | | S21184A2TT | CTGAAGTTTTGT | 19 | TET | A |
| | | | TGGAACAGG | | | |
| S21184 | | S21184F1 | CAAGCACTCCCG | 20 | | |
| | | | TTGGAGATG | | | |
| S21184 | | S21184R1 | GGAAAGACGAA | 21 | | |
| | | | GAGTTTGAACA | | | |
| | | | GA | | | |
| S21185 | SEQ ID NO: | S21185A1FM | TGACTGAAATTA | 23 | FAM | G |
| | 22 | | TCCTACCTT | | | |
| S21185 | | S21185A2TT | TGACTGAAATTA | 24 | TET | C |
| | | | TCGTACCTT | | | |
| S21185 | | S21185F1 | TCCAATTATCCA | 25 | | |
| | | | GTGATCTCCGA | | | |
| S21185 | | S21185R1 | TTATGGCTATCA | 26 | | |
| | | | GACCACTTCCC | | | |
| S21187 | SEQ ID NO: | S21187A1FM | AGAGCAGGATC | 28 | FAM | G |
| | 27 | | GCTTGAT | | | |
| S21187 | | S21187A2TT | AGAGCAGGATT | 29 | TET | A |
| | | | GCTTGATG | | | |
| S21187 | | S21187F1 | CAGCCATGTTTG | 30 | | |
| | | | GCCTCATTG | | | |
| S21187 | | S21187R1 | TGGTTGTATGGT | 31 | | |
| | | | GGATCTTCTTGG | | | |
| | | | T | | | |
| S21188 | SEQ ID NO: | S21188A1FM | TTAGTGATTGGA | 33 | FAM | A |
| | 32 | | GAACATCTTG | | | |
| S21188 | | S21188A2TT | AGTGATTGGAG | 34 | TET | G |
| | | | AGCATCTTG | | | |
| S21188 | | S21188F1 | GGTGGTGAGGG | 35 | | |
| | | | AAGGTCTTT | | | |
| S21188 | | S21188R1 | GGCGTCTCTTCC | 36 | | |
| | | | GATTTCAAC | | | |
| S21189 | SEQ ID NO: | S21189A1FM | AACTTCTCCTCA | 38 | FAM | A |
| | 37 | | AACCAGA | | | |
| S21189 | | S21189A2TT | TTCTCCTCCAAC | 39 | TET | C |
| | | | CAGA | | | |
| S21189 | | S21189F1 | CCTTTCAATGAC | 40 | | |
| | | | TCTTGTTCTTCC | | | |
| S21189 | | S21189R1 | GACCTGAGAGA | 41 | | |
| | | | GTTGACGGA | | | |
| S21191 | SEQ ID NO: | S21191A1FM | AGGCAATAAAT | 43 | FAM | G |
| | 42 | | ACCATCGATAC | | | |
| S21191 | | S21191A2TT | CAGGCAATAAAT | 44 | TET | A |
| | | | ACCATTGATAC | | | |
| S21191 | | S21191F1 | TGAAACCTTCTC | 45 | | |
| | | | GATACTTCCTTC | | | |
| S21191 | | S21191R1 | GGCTTGTTGCCT | 46 | | |
| | | | TTCATGCTA | | | |
| S21194 | SEQ ID NO: | S21194A1FM | TGATGCTTAGCA | 48 | FAM | C |
| | 47 | | TTGCA | | | |
| S21194 | | S21194A2TT | TGATGCTTATCA | 49 | TET | A |
| | | | TTGCAA | | | |
| S21194 | | S21194F1 | GTTATGAGAGT | 50 | | |
| | | | GAAGCCAAGTG | | | |
| | | | AA | | | |
| S21194 | | S21194R1 | TCAGCAAGTTCT | 51 | | |
| | | | GCCAAGACAT | | | |
| S21195 | SEQ ID NO: | S21195A1FM | CTCGAGTTACTT | 53 | FAM | A |
| | 52 | | AGCGTATG | | | |
| S21195 | | S21195A2TT | TCGAGTTACTTT | 54 | TET | T |
| | | | GCGTATG | | | |
| S21195 | | S21195F1 | CGGAAGAACTTT | 55 | | |
| | | | GCCATCTTAGTG | | | |
| S21195 | | S21195R1 | GCAGTGCTCTGA | 56 | | |
| | | | TTTCAAATTCAA | | | |
| S21196 | SEQ ID NO: | S21196A1FM | TGGTCGGAGAA | 58 | FAM | A |
| | 57 | | GGAAAGT | | | |
| S21196 | | S21196A2TT | TGGTCGGAGGA | 59 | TET | G |
| | | | GGAAAGT | | | |
| S21196 | | S21196F1 | CGGGAAATTCC | 60 | | |
| | | | GGCGAGA | | | |
| S21196 | | S21196R1 | CGCTCCTCACTT | 61 | | |
| | | | CGAGTCTTC | | | |
| S21197 | SEQ ID NO: | S21197A1FM | CTTCAACTTCCG | 63 | FAM | G |
| | 62 | | ATAGGG | | | |
| S21197 | | S21197A2TT | CCACTTCAACTT | 64 | TET | A |
| | | | CTGATAG | | | |
| S21197 | | S21197F1 | GCACGTACCTTC | 65 | | |
| | | | TTCAAGCGAAT | | | |
| S21197 | | S21197R1 | AGCTCAGCGTCG | 66 | | |
| | | | TCGTCTA | | | |
| S21198 | SEQ ID NO: | S21198A1FM | TGTATCTGCTGC | 68 | FAM | C |
| | 67 | | TTCTG | | | |
| S21198 | | S21198A2TT | TGTATCTGCTTC | 69 | TET | A |
| | | | TTCTGT | | | |
| S21198 | | S21198F1 | ACGAGTGAACT | 70 | | |
| | | | GTGCTCCAA | | | |
| S21198 | | S21198R1 | GGACCCAATTCA | 71 | | |
| | | | CTATGGCTTGT | | | |
| S21203 | SEQ ID NO: | S21203A1FM | CCGTATTGGATG | 73 | FAM | A |
| | 72 | | GATTGGT | | | |
| S21203 | | S21203A2TT | ATTGGATGGGTT | 74 | TET | G |
| | | | GGTGAC | | | |
| S21203 | | S21203F1 | CCTGAGACAGTA | 75 | | |
| | | | CATGTGGATGA | | | |
| S21203 | | S21203R1 | TGTGGCCCTGTA | 76 | | |
| | | | CCTCTAGTA | | | |
| S21204 | SEQ ID NO: | S21204A1FM | CATCTGCCTCGA | 78 | FAM | C |
| | 77 | | ACAT | | | |
| S21204 | | S21204A2TT | TGCATCTGCCTC | 79 | TET | A |
| | | | TAACAT | | | |
| S21204 | | S21204F1 | CTCAGCAGCAGC | 80 | | |
| | | | AACCAA | | | |
| S21204 | | S21204R1 | GTGTTCCTTTGA | 81 | | |
| | | | TCTGTGCATCTT | | | |
| | | | A | | | |
| S21205 | SEQ ID NO: | S21205A1FM | TAGAGTCTGTAA | 83 | FAM | A |
| | 82 | | CAATTGCC | | | |
| S21205 | | S21205A2TT | CTAGAGTCTGTA | 84 | TET | G |
| | | | ACGATTGC | | | |
| S21205 | | S21205F1 | GCCCACCTTTAA | 85 | | |
| | | | CTGATCTTGTGA | | | |
| | | | T | | | |
| S21205 | | S21205R1 | GAGACGTACAC | 86 | | |
| | | | AGGAGAGATCT | | | |
| | | | AAT | | | |
| S21206 | SEQ ID NO: | S21206A1FM | CAGCTCATATTC | 88 | FAM | A |
| | 87 | | ATCAATGTA | | | |
| S21206 | | S21206A2TT | AGCTCATATTCA | 89 | TET | C |
| | | | TCCATGTATT | | | |
| S21206 | | S21206F1 | TTCCTGTGCTGT | 90 | | |
| | | | AGGTTGGT | | | |
| S21206 | | S21206R1 | CCGCCACCCATA | 91 | | |
| | | | TAACTGCTA | | | |
| S21208 | SEQ ID NO: | S21208A1FM | ACAAGTTCCGGT | 93 | FAM | C |
| | 92 | | TCCTTAT | | | |
| S21208 | | S21208A2TT | CAAGTTCCGTTT | 94 | TET | A |
| | | | CCTTA | | | |
| S21208 | | S21208F1 | CCGTTCCGTGGA | 95 | | |
| | | | AAGCTTCAG | | | |
| S21208 | | S21208R1 | CCACAATATGGT | 96 | | |
| | | | TAGTTTCCCTCC | | | |
| | | | T | | | |
| S21210 | SEQ ID NO: | S21210A1FM | AAACAAAACCCC | 98 | FAM | A |
| | 97 | | ACAAAGGAG | | | |
| S21210 | | S21210A2TT | ACAAAACCCCAC | 99 | TET | G |
| | | | GAAGGA | | | |
| S21210 | | S21210F1 | GGGATGAGAAA | 100 | | |
| | | | ACCCTAACGAGA | | | |
| | | | A | | | |
| S21210 | | S21210R1 | TCCATTCGGAGG | 101 | | |
| | | | CTCTAGCAT | | | |
| S21212 | SEQ ID NO: | S21212A1FM | ACGGGTTTGTTA | 103 | FAM | A |
| | 102 | | CATTTGG | | | |
| S21212 | | S21212A2TT | CGGGTTTGTTAC | 104 | TET | G |
| | | | GTTTGG | | | |
| S21212 | | S21212F1 | CTGCTGCTCGTA | 105 | | |
| | | | GGAAGGA | | | |
| S21212 | | S21212R1 | CACCCAACTCTG | 106 | | |
| | | | TGCCTGTAAT | | | |
| S21213 | SEQ ID NO: | S21213A1FM | CGTCCATCTCAT | 108 | FAM | A |
| | 107 | | TACG | | | |
| S21213 | | S21213A2TT | CGTCCATCTCGT | 109 | TET | G |
| | | | TACG | | | |
| S21213 | | S21213F1 | TGATGCGTCGTT | 110 | | |
| | | | GACTTGTTTC | | | |
| S21213 | | S21213R1 | TGCGTGCAAATG | 111 | | |
| | | | GTCGTC | | | |
| S21214 | SEQ ID NO: | S21214A1FM | CACACTCACCAC | 113 | FAM | G |
| | 112 | | CTGA | | | |
| S21214 | | S21214A2TT | AGCACACTCATC | 114 | TET | A |
| | | | ACCTG | | | |
| S21214 | | S21214F1 | CCTCCTCTCCAA | 115 | | |
| | | | ATTCATTTCTTCA | | | |
| S21214 | | S21214R1 | CCTTGCTTCAGC | 116 | | |
| | | | TTTCCTTCCATT | | | |
| S21215 | SEQ ID NO: | S21215A1FM | TTTAAATGGAAA | 118 | FAM | A |
| | 117 | | CCCAAACC | | | |
| S21215 | | S21215A2TT | TAAATGGAAGC | 119 | TET | G |
| | | | CCAAACC | | | |
| S21215 | | S21215F1 | GGACACAATAG | 120 | | |
| | | | GCTTGGAAGGT | | | |
| S21215 | | S21215R1 | TGCCAAAGTTGG | 121 | | |
| | | | AGGAATCACC | | | |
| S21217 | SEQ ID NO: | S21217A1FM | CACTCTGTATTT | 123 | FAM | A |
| | 122 | | TACAGTTAATT | | | |
| S21217 | | S21217A2TT | TCTGTATTTTAC | 124 | TET | C |
| | | | CGTTAATTG | | | |
| S21217 | | S21217F1 | AGGCTGGAGGT | 125 | | |
| | | | GCTTACACATTG | | | |
| S21217 | | S21217R1 | TGCTCCGGACAG | 126 | | |
| | | | TGACA | | | |
| S21219 | SEQ ID NO: | S21219A1FM | TAACTTGGTCGC | 128 | FAM | G |
| | 127 | | ATTGTG | | | |
| S21219 | | S21219A2TT | CAGTAACTTGGT | 129 | TET | A |
| | | | TGCATTG | | | |
| S21219 | | S21219F1 | CACAGCTCCTGG | 130 | | |
| | | | TGTTCCAAT | | | |
| S21219 | | S21219R1 | CACTATGATCTC | 131 | | |
| | | | CCTCCCATAAAT | | | |
| | | | C | | | |
| S21220 | SEQ ID NO: | S21220A1FM | TTTCTTGAATGT | 133 | FAM | A |
| | 132 | | AGGTTCCT | | | |
| S21220 | | S21220A2TT | TCTTGAATGTGG | 134 | TET | G |
| | | | GTTCCT | | | |
| S21220 | | S21220F1 | TCTTGGGCGTGC | 135 | | |
| | | | ATTTTATGAA | | | |
| S21220 | | S21220R1 | GCAGTCACTCAA | 136 | | |
| | | | AGCTCTGTG | | | |
| S21224 | SEQ ID NO: | S21224A1FM | AATGCATCCAGC | 138 | FAM | A |
| | 137 | | AGTTCC | | | |
| S21224 | | S21224A2TT | CATCCAGCGGTT | 139 | TET | G |
| | | | CCAA | | | |
| S21224 | | S21224F1 | CCAAGCAAGTTT | 140 | | |
| | | | GAAGCAGCA | | | |
| S21224 | | S21224R1 | GGATTGGTTATT | 141 | | |
| | | | GATGTGTTCGTT | | | |
| | | | C | | | |
| S21227 | SEQ ID NO: | S21227A1FM | TTCCAGCGCAAG | 143 | FAM | A |
| | 142 | | ATGG | | | |
| S21227 | | S21227A2TT | CAGCGCACGAT | 144 | TET | C |
| | | | GGG | | | |
| S21227 | | S21227F1 | GGAGAGATATC | 145 | | |
| | | | CTGCGGTAGAC | | | |
| S21227 | | S21227R1 | GGTGCTCACGT | 146 | | |
| | | | GCTCCAT | | | |
| S21228 | SEQ ID NO: | S21228A1FM | CCTTGAGAGCCA | 148 | FAM | A |
| | 147 | | AATGAAA | | | |
| S21228 | | S21228A2TT | CCTTGAGAGCCG | 149 | TET | G |
| | | | AATGAA | | | |
| S21228 | | S21228F1 | CATTCCATAGGC | 150 | | |
| | | | AATAGCTTCCAG | | | |
| S21228 | | S21228R1 | AAGTGGGTGTC | 151 | | |
| | | | TCCTATTACCAT | | | |
| | | | AC | | | |
| S21229 | SEQ ID NO: | S21229A1FM | CAATGATGTAGA | 153 | FAM | C |
| | 152 | | TTGTCACTAT | | | |
| S21229 | | S21229A2TT | TGATGTAGATTG | 154 | TET | G |
| | | | TGACTATCA | | | |
| S21229 | | S21229F1 | ATCCTGTTTTCT | 155 | | |
| | | | AGGGCATGACC | | | |
| | | | AA | | | |
| S21229 | | S21229R1 | ACAACTTGTCCA | 156 | | |
| | | | AGGTCCACTCAA | | | |
| S21231 | SEQ ID NO: | S21231A1FM | TTGGGTGGATG | 158 | FAM | G |
| | 157 | | CGAAGTA | | | |
| S21231 | | S21231A2TT | TTGGGTGGATG | 159 | TET | C |
| | | | GGAAGTAC | | | |
| S21231 | | S21231F1 | GAACCCGTGCC | 160 | | |
| | | | GTAATCC | | | |
| S21231 | | S21231R1 | ACAGTATGAGT | 161 | | |
| | | | GGAAGGTATGA | | | |
| | | | GG | | | |
| S21232 | SEQ ID NO: | S21232A1FM | CGAATCTGCTGT | 163 | FAM | A |
| | 162 | | GATTGTT | | | |
| S21232 | | S21232A2TT | AATCTGCTGTGG | 164 | TET | G |
| | | | TTGTTGA | | | |
| S21232 | | S21232F1 | GAAACAGCTTGT | 165 | | |
| | | | GGTTGAAGAGA | | | |
| | | | A | | | |
| S21232 | | S21232R1 | CGGAGCCATTTG | 166 | | |
| | | | ATTCATGTCA | | | |
| S21233 | SEQ ID NO: | S21233A1FM | TCTGTTTCTATTA | 168 | FAM | A |
| | 167 | | ACATTTCA | | | |
| S21233 | | S21233A2TT | TCTGTTTCTATTT | 169 | TET | T |
| | | | ACATTTCA | | | |
| S21233 | | S21233F1 | GCACCACACTTC | 170 | | |
| | | | CACTCTCA | | | |
| S21233 | | S21233R1 | TGCTGCCATTGC | 171 | | |
| | | | TCTTCTTC | | | |
| S21234 | SEQ ID NO: | S21234A1FM | TGGTTTAACTCC | 173 | FAM | G |
| | 172 | | GTACTAA | | | |
| S21234 | | S21234A2TT | TTTGGTTTAACT | 174 | TET | A |
| | | | CTGTACTAA | | | |
| S21234 | | S21234F1 | TTGGTGAAGGA | 175 | | |
| | | | TACTCCCCATTC | | | |
| S21234 | | S21234R1 | GTGGAAAAGAT | 176 | | |
| | | | TATTGTGGCCTG | | | |
| | | | AA | | | |
| S21235 | SEQ ID NO: | S21235A1FM | AGCGAGTTACTC | 178 | FAM | G |
| | 177 | | TGGATACC | | | |
| S21235 | | S21235A2TT | AGCGAGTTACTT | 179 | TET | A |
| | | | TGGATACC | | | |
| S21235 | | S21235F1 | ACCAACGGATTG | 180 | | |
| | | | GCATGCTTC | | | |
| S21235 | | S21235R1 | TGAATTGGCAAA | 181 | | |
| | | | TGATCTTGAGGT | | | |
| | | | T | | | |
| S21237 | SEQ ID NO: | S21237A1FM | AGCCACCCTCTC | 183 | FAM | G |
| | 182 | | AAGAA | | | |
| S21237 | | S21237A2TT | AGCCACCCTTTC | 184 | TET | A |
| | | | AAGAAG | | | |
| S21237 | | S21237F1 | CAGAGGAGGAG | 185 | | |
| | | | AGTCCAAGTGT | | | |
| S21237 | | S21237R1 | TGTTGGAGGTG | 186 | | |
| | | | TTGGTTGTGAT | | | |
| S21238 | SEQ ID NO: | S21238A1FM | TTAAATGCCTCA | 188 | FAM | A |
| | 187 | | CAACAC | | | |
| S21238 | | S21238A2TT | ATGCCTCGCAAC | 189 | TET | G |
| | | | ACTG | | | |
| S21238 | | S21238F1 | CCATCAATTTGA | 190 | | |
| | | | ATCACGGGTTTG | | | |
| | | | C | | | |
| S21238 | | S21238R1 | GTTGGACATCGA | 191 | | |
| | | | TTGATACAGACA | | | |
| S21239 | SEQ ID NO: | S21239A1FM | TGACGAACTTGA | 193 | FAM | A |
| | 192 | | AGGTGA | | | |
| S21239 | | S21239A2TT | CGAACTTGAGG | 194 | TET | G |
| | | | GTGAAGA | | | |
| S21239 | | S21239F1 | GGTGAGGAAGA | 195 | | |
| | | | AGTCGAAGATG | | | |
| | | | T | | | |
| S21239 | | S21239R1 | TTCGCCTCTCCTT | 196 | | |
| | | | CACAAC | | | |
| S21242 | SEQ ID NO: | S21242A1FM | AACCCAAGTCAA | 198 | FAM | G |
| | 197 | | CTACTATA | | | |
| S21242 | | S21242A2TT | TGAACCCAAGTC | 199 | TET | A |
| | | | AATTACTAT | | | |
| S21242 | | S21242F1 | TCTCCCTTTGGC | 200 | | |
| | | | TGAATCCAC | | | |
| S21242 | | S21242R1 | CACCAGCATAAC | 201 | | |
| | | | CAGCTTTACAA | | | |
| S21243 | SEQ ID NO: | S21243A1FM | TGGTAAGAGAA | 203 | FAM | A |
| | 202 | | GAGATATCGC | | | |
| S21243 | | S21243A2TT | TGGTAAGAGAA | 204 | TET | G |
| | | | GAGGTATCGC | | | |
| S21243 | | S21243F1 | GACAGAGAAAG | 205 | | |
| | | | AGACAGCACCAT | | | |
| | | | T | | | |
| S21243 | | S21243R1 | AGCCGCGCCTCT | 206 | | |
| | | | AACTTGTAG | | | |
| S21244 | SEQ ID NO: | S21244A1FM | TTGCCTTTCTAA | 208 | FAM | A |
| | 207 | | CTCTAAG | | | |
| S21244 | | S21244A2TT | TGCCTTTCTGAC | 209 | TET | G |
| | | | TCTAAG | | | |
| S21244 | | S21244F1 | GCAAGGAGGGC | 210 | | |
| | | | ATTTGGAA | | | |
| S21244 | | S21244R1 | CCTGAATCGTCC | 211 | | |
| | | | CTGAATCATC | | | |
| S2144 | SEQ ID NO: | S2144A1FM | CAATGAAGATG | 213 | FAM | G |
| | 212 | | GGAAACAGT | | | |
| S2144 | | S2144A2TT | TACAATGAAGAT | 214 | TET | A |
| | | | GGGAAATAGT | | | |
| S2144 | | S2144F1 | GCGTATGAATG | 215 | | |
| | | | GTGTATGCGA | | | |
| S2144 | | S2144R1 | CACTGCCAACCA | 216 | | |
| | | | AAATAGTGACTT | | | |
| S2187 | SEQ ID NO: | S2187A1FM | TAAACTTACCTA | 218 | FAM | T |
| | 217 | | TGATGCAC | | | |
| S2187 | | S2187A2TT | CTAAACTTACCT | 219 | TET | A |
| | | | TTGATGCA | | | |
| S2187 | | S2187F1 | ATGGGCTTTGTG | 220 | | |
| | | | AATATCCAACG | | | |
| S2187 | | S2187R1 | CCTCTCAATTTG | 221 | | |
| | | | AAGTATGCTCCA | | | |
| S256 | SEQ ID NO: | S256A1FM | CACCGTATCGAC | 223 | FAM | G |
| | 222 | | GTGT | | | |
| S256 | | S256A2TT | CACCGTATTGAC | 224 | TET | A |
| | | | GTGTG | | | |
| S256 | | S256F1 | CAGAGAGAATC | 225 | | |
| | | | GCGTCCGA | | | |
| S256 | | S256R1 | TTGACCGCGTGT | 226 | | |
| | | | CCGA | | | |

### Example 4: Wide Crossing, Embryo Rescue & Introgression of Resistance Conferring Intervals into Glycine max Lines

[0204] Embryo rescue will be performed and chemical treatment will be applied in order to generate amphidiploid shoots. If the amphidiploid plants are fertile they will be used to backcross with G. max. Backcrossing with G. max and subsequent embryo rescue will need to be performed for several generations in order to gradually eliminate the perennial Glycine chromosomes.

[0205] Wide crosses: Elite Syngenta soybean lines (RM 3.7 to 4.8) will be used as the females (pollen recipients) and multiple accessions of Glycine canescens will be used as the males or pollen donors. Flowers will be collected from the glycine plant containing anthers at the proper developmental stage. This will include new, fully-opened, brightly colored flowers holding anthers with mature pollen that appears as loose, yellow dust. These flowers will be removed from the glycine plant and taken to the soybean plant for pollination. Pollen from the Glycine plants will be used within 30 minutes of flower removal. Soybean flower buds will be selected for pollination when they are larger in size compared to an immature bud, when the sepals of the soybean blossoms are lighter in color, and the petals are just beginning to appear. The sepals will be detached from the flower bud to expose the outer set of petals which will then be removed from the flower to expose the ring of stamens surrounding the pistil. Using 1 male flower, the anthers will be exposed, and pollen grains will be gently dusted onto the stigma of the soybean flower. Starting the day after pollination a hormone mixture will be sprayed onto the pollinated flower and eventual developing F1 pod once every day until harvest. The pollinated flower or pod will be saturated with a light mist of the hormone mixture (containing 100 mg GA3, 25 mg NAA and 5 mg kinetin/L distilled water), to aid in the retention of the developing pod and in increased pod growth.

[0206] Harvest: Pods from wide crosses will be harvested at approximately 14 to 16 days post pollination. Before selecting an individual pod to harvest, it will be verified that the sepals are removed and the seed size is as expected for a wide cross. Pods will be collected and counted according to wide cross combinations to determine crossing success. The wide cross pods are expected to contain 1 to 3 seeds.

[0207] Embryo rescue: Harvested pods will be sterilized by first rinsing with 70% EtOH for 2 to 3 minutes and then placing in 10% Clorox bleach for an additional 30 minutes on a platform shaker at approximately 130 RPM. After rinsing the pods multiple times with sterile water to remove any residual bleach, embryo isolation will be performed. If this is not started immediately following pod sterilization, pods will be stored at 4° C. for up to 24 hours prior to embryo isolation. Next, in a laminar flow hood, individual pods will be placed in a sterile petri dish and opened using a scalpel and forceps. An incision will be made along the length of the wide cross pod away from the seed, to expose the seed. The seed will be removed from the pod and placed in a sterile petri dish under the dissection microscope. Holding the side of the seed away from the embryo, with hilum facing up, the seed coat will be removed from the side of the seed containing the embryo. After peeling off the membrane surrounding the embryo, the embryo will be pushed up from its bottom side. Embryos should be past the globular developmental stage and preferably past the early heart developmental stage (middle to late heart stage, cotyledon stage and early maturation stage embryos are desired). Isolated embryos will be transferred to embryo rescue medium such as Soy ER1-1. Embryos will be treated to induce chromosome doubling at this time. (See below). Isolated embryos will be maintained on embryo rescue medium for 21 to 30 days at 24° C. No callus induction stage will occur in this protocol. Shoots will develop directly from the embryos.

[0208] Chromosome doubling treatments: Colchicine of trifluralin will be used to induce chromosome doubling. Ideally, late heart stage wide cross embryos (or larger) will be chemically treated to induce chromosome doubling at any time from immediately following isolation up to 1 week post isolation. The doubling agent will be mixed in either solid or liquid medium and applied for several hours or up to a few days. Trifluralin will be used at a concentration of 10-40 uM in either solid or liquid media. Use of trifluarin will reduce the colchicine requirement. Colchicine will be used at a concentration of 0.4-1 mg/ml in either solid or liquid media. Following the chemical treatment, the embryos will be transferred to fresh embryo rescue medium.

[0209] Shoot regeneration: Developing embryos will be transferred from rescue medium to germination medium such as Soy ER GSMv2 for approximately 3 to 5 weeks in the light at 24° C. Alternatively, developing embryos can be transferred from rescue medium to elongation medium such as Soy E1 0 No TCV for approximately 3 to 5 weeks in the light at 24° C. Developing shoots will be transferred from media plates to Phytocons containing either germination or elongation medium for further shoot development. Established shoots will be moved to soil.

[0210] Ploidy Analysis: Ploidy analysis will be conducted using a flow cytometer. Leaf tissue for ploidy analysis will be collected from small shoots either in culture or after establishment in soil. Tissue will be collected on dry ice and stored at −80° C. until analysis or collected on wet ice and analyzed the same day. A sample size of 0.5 cm² will be sufficient. Samples will be prepared according to the instructions in the Sysmex kit. Each sample set will contain an untreated F1 plant (not treated to induce chromosome doubling) as a control.

[0211] Harvest—Pods will be harvested at 14 to 16 days after pollination.

[0212] Embryo rescue—Since the disclosed embryo rescue protocol involves direct shoot regeneration from embryos, rather than regeneration through embryogenesis, plant recovery will be expedited with shoot recovery in approximately 2-3 months.

[0213] The above examples clearly illustrate the advantages of the invention. Although the present invention has been described with reference to specific details of certain embodiments thereof, it is not intended that such details should be regarded as limitations upon the scope of the invention except as and to the extent that they are included in the accompanying claims.

[0214] Throughout this application, various patents, patent publications and non-patent publications are referenced. The disclosures of these patents, patent publications and non-patent publications in their entireties are incorporated by reference herein into this application in order to more fully describe the state of the art to which this invention pertains.

The application's sequence listing, which the Patent Office published only in electronic form, follows.

SEQUENCE LISTING (226 sequences)

SEQ ID NO: 1 - DNA, 527424 bp, Glycine canescens
  source 1..527424: mol_type = genomic DNA
ctccggcgccgtccgcgccaacatggcggtggccctggcgccaccagcgccaatcccgcgccaacagcgcggaattccagaagttgcggcgccactggcgccgtcccggcgccgtcagcgccaacttccaggggctctggcgcttctagcgccgcgtcccacgctccaagcgtgagattccagagaaaatcacatttcctctcaacttcccgcgctacccgcgccaagtctcagggcattataatgacccagctcactgttaatatagcacagcttatctcagatgcaatttatcagtttgttaccattgagctacccagacatcccacagacccggagaaggctaataaggcattaggatttcctgcccttattactggactctgtagatctcatggagttccagtacagccttctaagactattagacctccaattaaccgtgtgttcattgagaaattttgtttagccagacaggttccacaggaggagcagccacctcagccaccacagcccgcatctctggagtacatttctgctcacctacatcgtatggaactccggatgcaacatttagaagaccaataagctgcgaaccacaggggtcaaatgaggatgaaccagagcttttatgatttcttccatcatcagcagagacgggaccccaccccatttcactggcctacccaggagcagtttagcactcacattgcatggcctggggacaggcccactttccagggggaggcaggaggccagggagctgatccggagcccgcagctgaccctgtccatgaagaagaagttgaagaggaggatgatttgtagtatctacatcggacatccggagcactgtgactttgttttattttcagtttttcttgttcctttttgaatattttgcattatttatgtctttattacgttagttactttgttatggttattgctactgactatttcacatgttattagcactaacagatctttttggaactagatattagtaacatgtctttttgaaaaaatttcaccaaaaatttcaccaaaatttttgcttttgtttatagttatagtgaatataatatctttttgggacttaaaggaaataattttcttgaaaaatgatgtgttttgaaaagaatcagcaaaatactattttttgaaaattgatttttaatattagatcagaaaaacaaaatgatttttaaaccttgagaatgaaaaacaaatgaatgattttccaaaaatcaaaatgaaggcaagaatttcttcatatagaattaataaagaatatcttttgaaacattgatttgatttaaacatgaaaacaaactttaagcccagtaagtgtgtgcaatcacataaattgtattgagagtcctcactgataatgatttatagtaattttgcataaatttctaattgtcaaaacatatgatacatggatatgatttaggccatctttctttttgaacaaattttaaagccactggccaaaaagctatcccaacatgaatataatgatttaccaattgcaaccctttttgagccaaacagttaatttttattgaaaccataacctaggataggaattccctaccttacctaaggttaggagagcaaaaagggaaataatatgttgatgggaaacttcctttgggtacttcatgctgtgaaaaagatttctaaatgtggttatatgttattcatgcaaaaaaaaaaaaaaaaaagaaaaggaaacaaattccttgtgctttcaatgtgttatacaaagttgggcaaataaaaagatgaataaaatcttggaagaaaaggaagaaataggaagtaaaaatttcactgctttatctatatatgctctcctattccctaggttctttgaatatccagaaaaaccaagatttcttttctaaccaagagccagccataaaagacctgatgatctttgttgattatgaactttgattcaataggaaatgaactgcaaaatcaatctataaattatcagtgttggaaatgagaataaacactcacctgtgagaaataaacactttgagaggttttcctctgtttgaatcaatcacatgtttcttctgattattctttagaaaggaaatgtgaattaaatcttaatctcaatttggttatgtgaatttcatctattgtttcaaaattctcaaggttcgctatttaattctgatcaattttttggaagttgattctttacaaaacatgtttttatttactattgcttgaggacaagcaagattctaggttgggggagttgataaatgccacatataagtcaaaataaggtcacatttaaggcatttatctaaaggttttattgagaaaattcatcaaatttaccctaatttagtttgttaagatgaaaagcctagcataaatgtcataattataaattcggaatattaatccaatcatattttatattttgatagattccgtggaatgctagagctttcggaaataaaaagcaagccaaatggattaaacaaagcaaacaggggaggtgcaccaagcagatcaggcccagaagcccaaaaaggattccctggtgcatttaactcgcctgggcgagtgatccctttgtatttcactcgcctgggcgagtggacgccaagtgggccacttgggccagctgtgaacagccaagttggagcccaagttgcaggaggctcgcccaggcgactggaacaggctattttgacgcgcctgggcgagtgaaggcggccagaaaacacctataaataccccaacacccttcatttgttttttacactttttccattgctttctttctctttggggcttctaaggtgctcttaaaaaccttagcttttcttctaaacttgtattaaggagtgatttagttagggagagattaatatagagtgcggaagctctgccggacaagaatgaggatgatacttttcatctatttttctaaggagaactgccccatggtcggctaaacttcgcgcacatggattggatgtaatcttcttaccctaaactatttcttttaatatatattcatgcattagttctactatttatttttgatagatttattctgcgcttaatgcttgattctacttgatcaatagtctcaagaaattaggttcttaagtttaactgggaagtactcttaaaaacttgaactgagtaaatttattctttacgttacgatcactagacatagggcgtaccgtttagattgcaaataacacgtgaatatgattgtaatgctaagggtatttattttatatgcgagggatcgatatttgataaatatttcttaagaattctcaattgcgagggatcgatttgggatgattttatgtgtgcatcaaaaataaaaagaattaacttatgcatggtaatattaattgaatattaagggtatgaatgatgaaatccaatactgtgcctctcttaaattaatctcgttttattaaagttttcgtatattttctgtaattcctagtaatcattagtaatcatttatactaaatttattatttccattttcctttaaaattgagaatttctgttaaaacatcactacatgcaactctgttcacgctcattgtacataactattaacttgataagctttatttgaattaactaaagtaaaaatcaaatccctgtggagacgatctttataaattttataacttacaatgacaattggtacgcttaccaaaagagtctaacaataatataatagaagtagtaggggcttcatagagactttcattctaaaggaagccgaagaacaaacctttagtcaataggagccctacttccctctttgcgacctcatcacttcaatgccaaacccatttcttagtcaccgggcggagcgcacctttggtacttccgtagggcgagctttttgatagtggcttctttcgtttggtagggcgacgaaagaaaggctactttcaatctaggaaacagtcggaaactcgagatggtcgcctgtggaagcgtttgccgataaccaaagcgtcactccttcctttgattatgtcgtgacgctgactgaatccaatccataaacccgaaaacgaaacaaagttcgttccctttcgtcaagtaggtaaagtaggcatacgaacccacttttgctttgccttagacgactctattggaacaaagcaaagaaggaggcggaatggagaaaggacaagggcggtcttgcttggcgtgaaggctgctggtttgggggtagggtacggtactaaaggtcctcggacttccaggcgatttttcttttggacagttgttcaccgttggatctcaccaatacagccccctatagttttcgttaccgagatatcttttttttcattgttcccagggatttttttgggtaatccgctcccaataataagcacatgatcgatctaaaaacaatttaaccataatcaattcatatatacaattataaacaaaaacatttttgtagtttaaattaaaacaaaatttaatttattcaattcagaattgcatacctgaatatgtcgcatgcatgcgacatgtaggaatccagcctgtcctaacaactcagcaacgatgtcaggtatattgtcacaatctggccccccgtgattttaccacgtcgagtcttcaacactcaacatgtgtcctcgttccacacagcatgtgaaatgtgggtgcgctgggtacgtctccgcaaaacaccccacttatacgggatagggataacatgggttgtcggatctctgggctcaccctcatgatcggatccagaccgcgaagaatcagacgatgatgaatcaaccatttaatgactatcttaatataaataaatcaatattataattaataatttaataccctaatttaattcttcctattaatcaaaaattaaactaaactataactttaataaaatagttctaactaaactgaactaaataactttagtaaaataattctaaattaaaaactaaactaacctatcatctaaaataattctatgtaacagtccctaacaaatttctacgaaggtaacatctaagcctctaaaaattacctacatcgctaacaatttcatatggccctaacaatttaataccataatttaatacttcctattaatcaaaaattaaactaaactaaactataactttaataaaatagttctaactaaactgaactaaataattttactaaagtaattctaaattaaaaactaaactaaactatcatctaaaacaattctatgtaacagtccctaacaattttctacgaatcaaatatctacaccgctaaaaattacctacgtcgctaacaatttcatgtggccctaacaattttctaattcaataatataatatattaaataatatgcaaaattattaaattcacttacttgttggcagagcttcgttgcagagataacccacttacaaactctagagaaaaattttagaaacttttacagagaatgtgaattggtaaatatggaaaaatagtaagaaaatttggtttatatggggtcagacatacccaatttgggcgtgtctgaacacgcccattttggacgtgtctgaacatgtccaatttgggcatctctgattaccccataagcgtaaatgattcaaaacaatcccaaatttataattttttatttaaaaaatattatattaatttttttgcctgccatcaagattataatatattagacaatattttccaaagcatcttaaagcaactgaaaaaaatatttaaaagtgaaaaccaattttgtgtcttcgcctgttaggctgttacataagcaaatttctgtttaaatttgtttagcaacactaggcatttgcttattaacatacaaatacagttatatatcaatattagacactcgatacctcatcaaacacaagaagtgacccggcttcatcacaagcattacgcagagactgtagaaattcttttgtagcactgtaaattccaccttctccttggatgggttccacaaaaactgcagcaatcttgccctgcttaattaattctaccgcagcctgagcatttccatactctaaaaaggtcactccaggcataacaggttcaaaaggtgttctgtgttgcactttacttatcaaagcaagtgcacccagggttctcccatggaagcagttactaaaagctatgaactctgttcctggctctttcccgttggtagctgtgtgtctctgatatttccttgcaaatttaatagctgcttcatttgcttcagttccagaatttgcaaagaatacacgatcagcaaatgaaggagtcacaaggcgcttcgcaagttctacctgcatcaattacaaaataattatagaaacaaataaaggtagaatgcaacactgtgcagacacataacatgctgctacaagaaatgaaccaaagtaaaacataatggaaccaccacatacaattccaaataaaaagatacaaaaataaagttataatatagacatgcaagataacattacaaccatatacttattggataaagcagaaactaaacaagttgttttctttccttttcagaatgtagatacaatataagagtgacattacaaaaccaaatgatcaatgacaatttctttctctgcaatctccaaagaacaaggaagtatacagctgaaatcttcaaatctgaaactctatcaagtaaaggaggggagattcaaataaagccagattaactagcatttatgcaaacagggaaaaaaaaaatacagggtctaaaattgatattggaaaaaatacaatacaccggactctatgaacattagagtctaaaattgagagagatctaaacaaatcttttaacacctatgaacctatgaagactaataactaaggattactaataaagtccttcaacttgtaaattaaaaaatactcatagaaagcttaagtgttgatgatgtaatgcacattatgtttcatttgggactttttttttcacttttataaattggtttagttttatagacaaattctagcttatagagttacaaaattgtgtgagcactatactctaatgccatgtttggtagagaagagaaaaatagggtagatggaaattaaatgagtaaatggaaataggtgagaaataaagtagaatttaaaggtgtttggttgaaaagaaatagaaaagagatgaggagacgagaaagacatagagatgagtagaaggggtgggtaagcgggccgatccgcctgcgtaaggcccttcgcctaagcccacattggcagcagactgggtcaactcatcctgcacttttacacgaacttaatacattggtccaccctcaccggcaaatcccgcggaccaaacgggttgatccgcaggcctagttttaaaaaaaaaaattaaaatttcaaaataaatatattttttctctaacaaatactcaaatacaaaaattctaacgcaaccaaataaattttcaacataaatgcaaagaaattttggattggacttttaggatcaattgagtttgggttgggcttggttggtggttgtgggtttgtggaccaatccacggaccccacgatccaaacccgtacaatccgcggattatgcaaggtgggtccaaaatcttgcatagtcatgaattttttttaaaatttggtctgtggtccgtgcagactgtgggccccatgggccggtccatggacataagcccatttacccactcctaagtggaaataggtgagaaatagtataggtgggtgggtcccacaattttaaaaaagtttccaccctaatcatatctgtcaaacaaaccaacttattttcatctctctccctcatccctatttctcctctaccaaagcttgataatgtttctcttcatttagtgaatgggtacaatacaaagcaagtactcaatcaggaaagtaactcctcagaagctatggtagatccccattaagaaaatcatgttccaccatcaaatttaagttttctttccattcactttgttaaaatccaacctcttccatacatttttcaaaaaaaattaagtgcacacaatttttcaattcagtcctatgtcatcataaattcagtaaattatgacttccaaaatctccaataaagccaaaataatagtttgataaacaccacattgagcaatcatgaataattaaatcatcattcccacctccaatgccccaaccctgacattgaaaaacaaattctcttaaaaacatttacaaaattatgcacaacttcacagatcaaaaaatgcaaaacaatgataaattatgtaagtttgaattatttataataaaccactaatgaaacaaatagcaaatttgttgccctgcttaagttttttaggaaaacaaagtttgttgatttttaatttttcttttgaaaaagatttattgatttttattataattattttaaatactcagaaaaagtgtgatctctacaaaaaaaaaataatgataactaatttttgataaaaaaataataatttttttaaaagttatacttaatatatttttttatttattgatagtctataaactttatcctgtcataaaagttaaactcatctaattatttgattaaaaatagaaaaggaaatgtaaaaagaaaaaggttagaatggggagcacgtccaatattactaagcaagggatgatgacatattgtgattgctagtgtagacttacttgattactagaatattattatacaaacctaaatcacaaaaagtttcacttaattattattactcaatttgaaaattgccctaagagttattcaccaagaaaaaacaagtgaggtaagggaattcatataaaattaatttgataagataaatttaacgtttttggactatatattcaattaaaggttaagggtcaaaaatgagttttttttatttatatttttatgagatttttttattaagtatcttaatattttataaaatattaaatagaaataacatatttaatatttttatttaataagtataaaactagcaaaaaataaaatatttgaaggatttaaattttttaattcttttttcttctaatgtcaaaaaattattcttaaaaaacctgaaaactgaattcgggataacattattagaaagaaaagaaagcaatagctttgtcccttggaagtgtcgttggtttaatttcaacccttttataatttgtctgcatttgaattgacgtagtcaatagtcatccattgcgggaatgaataaacaatatatattaaaaataacttaaacatagtttatttgtgaacaataatttggtcaacaatactttgtagaataggtttaaggaaaataaattggattgctactgcagatgttataacgttgaattaaaattaggtacagaaaactcgacacttggcctgcaagtttattataagtataaaaaatattttatcactaataaaatagatggttggatttttttagaatatagattaggatttttatttctgtatataaattttctattataaaaacaaaattaaatttaatacttgaaaagagattagtcttaattttttagttacagtctggtatagatttattttattttattattattattattattattattattattattattattattattattattatttagagactagtataagttttttcagggggtaaaatatggtattagtgatggtattttaattttaatcaatttggtattttaactttagaaatataatagtttttgtccctcatcacatacggtgaggagggatgaattgtaaagctcatatattaaattgatcaaattatagttagaaattaaaagtataaggattgaatatatatatatatatatatatatatatatatatatatatatatatatatacaaaaacaagctaataattattcattaataatcatgggacaatacatgaaggaagatgttgaaaattgtgaaactaagtgtgtatatagtttcatgttaaaaaattgattatgagttgaaataactttcaataactttcaataacttatgtattgaatctaaatttttgtattgaattttatttttaacttaattttaaaataaaaacatctaaatataaatcacattacttcaaaatcagttatattcaaaatcaattttgtcaatgtacactaataaatatagggtcactctaactagagaatcaacaacaatatcaacttgtctcctcacataaccaaggctaaagctatatgttggaccttgtgaagcccaagtagccttttacacttgcttttaaatgaaactgtgcgttttggtcatattggctatcatatatataaggcttttatttcacaaagtacaacacgttcctttttcatttggcttttacgcttcctttagtggcatactccagaagcttcgtattttgcttttctattcatcttcttgttttctctttaacctagctctgctagggaatgcgattactgcacaaatcttgagtgtggtgaggaaaaactgagtgatgatgatataggttgttctgtggtctgtgttttgcgttcatgttgttatggtattgcaggtggaggtcatctctctctcgggtttgatcctgttgatgttcttgaggctgttctctgtaaagaactgtgtgagagaaagttggaaagttgggtaatgtctgttcttgacattgataaagagtagttctcttttgtaccctgtaaatcttgttttcttgcttacctgagtaattttaggctttgttcttgttgaaagtttagccttgtaattactgaggaatgttgttggaatattttcttttactgtagtgttaataaaagattctacatgttctttgcccttggatgtaggtaagaaggattttatcctagttactgaaccaagtaaatctgtgtgtattttcttgctctttaatttttgcttccgcgttaattttcagtttgattgtgcgcttaaaactttaacaagtggtatcaagagctttggttggttcttgtgttcatgtcttctttgtgcatttcaggctttgattcgcaaggtctacctcagaccctcggacactcaagaatggattcagccagagtggagatggagaggtttgatgggaaaggagacttcaacatgtggcgcaagaagatgaaggttgttctggtacatcaaaagtgctctaaagcacttggtggtgagaaagacttaccttcatctttatctgaaacagataaaaatgatattcttgaaacgacctatagtctgttaattctgcatttgagtgataatgtttttagacaagttaatgatgaaactactgctgctggtatttggttaaaattagaatctatgtacatgactaaatctctttcaaacaaaatatatctaaaagaaaaattgtttggtttcagaatggaatctagtaaatctttggatgataatttagatgagtttaagagaataactattagtcttgctaatattgatgaaaagattactaatgaaaaccaagctattattcttctaaatattttgcctgattcctataaggatgtgaaatctgttattaagtatggaagagagtctctgtcattagaagatgtaataggagccttaaagtctaaagaactagaaatggtagttaataagaaggtcaatgtagagggactgtttattaaaaagaagtttggtaaaaagagtcagtttcaaggaaaagaaaaaggaaagaacaatactgagaataagaataagtcatcttttaagggaaaggtgacttgttggctgtgtcataaggaatgacacattaggaataattgtccagaaaaaggaaaaggtcaaaataatggaataggacagattatgctaatctgactagtgattttgaggatagtgaggtcctaactgtgtctaatgcttcttgtgagaaggagtgggtgatggattctggtagtacctaccatatgacacctgaaaaggaccaattagtctttcttaagaaaattaaaggtggaaaggtgatgatgggtaataaccaaacatgtcaagtagaaggtattggagctgttaggtttaggatgggagatgagactgttaagattctcaaggatgtgagatgggtccctaaccttaggagaaacctaatatctctagaaatgttagacaatagtggttacagttttaggagttttcaaggaactttagaagtggttaaaggatccatagttcttatgaaaggaatgttagataatggtctctattttctagatggagaagctttaggacctgagtcttgtagtgtcagtagaaagcctagtgagtcttctctttggcataaaagactaggccacattagtaatcaaggattacaagagttatataaacaaggtattttaagttttaaaatatttgcttctattgatttctgtgaaacttgtgttttggaaaaatctcacagattaaagtttcaaataggaaagaatgaaactaaaaatatcttggattatatacactctgatttgtggggttcacctaacattcctagttcactttctggttgtcattactttctttatatgattgattctcattctagacgtgtgtggacttattttttaaaacaaaaagatcaagcttttgattgttttaaagactggaaagtccaagtggaaactgaaaatggaaagaaggttaaagcattaagaactaataatggattggaattctgtagtaatcaatttaatgatttctgcaaacaatatggtattttaagacatagaacttgtgctaaaacacccagcaaaatggcattattgaaagaatgaatagaactatttgaaataaagttagatgcatgcttgctgattctggtcttagaaaatctttttgagcaaaagttgttgccactgcttgtcatattataaacaggtcaccttcatctgctattaatttcaaatctcccatgaaaatatggtatggtaagcctcctaacctgagttatatgaagccttttggttgtttagcttatgttcatactaaacaggataagttagctcctagggctcttaaatctatctttgtgggttatcctgcagggacaaaaggttataaactctggttaatatttgaaaataaatgtgttgttagtagaaatgtttttttcaatgaactgacattttataaagatattgtgtaggatactggacatgttaaagaacctggaaatgtccaattggaggtggagagcaccactggtattgattctgaactagttcagaatcatgatgaatctgaagatcaagttgacacacttgaccagcttgcaaatgatcaataaactagcgaagaaaatcaagaggactccaacctcaatgattattttctgactagagatagagttaggaggaatattatgtctcctagcaggtttgcttatgctgatattgatgcttttgccttgcaggttgctgaaattgttgaacaagaagaaccagcaacttacaaagaggcaatgagcatgaaatctcaagacagatgactgagagcaatggaggaagagatctcctcgttaaagaagattttgacctgggttcttgtggatagacccaaggagaaaaggatcattggatgcaagtgtgtcttcaagctgaagcctgaagtcccaggattggagaaggccaggtataaggccagactgatagccaaaggctactcacaggtagaaggaattgattacaatgaaaatttctctcctgtggtaaaacatacttctattaggcttattttatctgttgttgctattcttgatttagaattagaacaacttgatgttacaactgcttttttgcatggaagcttagatgaacagatctatatgaagcagccagaaggcttcatataaaaaggttctgaaaacaaagtttgcttgttgaaaaggtccctgtatggtttaaaacagacacctagacagtggtataaaaggtttgatgattttgttctttcacatggttttactagatgtaaatatgatcatcgtgtctattataagaaagacaatgaaaataaatacatctatttgttgatctatgtggatgatatgctaattgtttctcatgatattgaatgcattaacaaattgaacgagatgttgctgaaggaatttgatatgaaaatccttggtcctgctaagagaatcttaagtatggatatagtaagaaatagaaaagaaagaaccttatctttatctcaagttgtgtatgttaagaaggttgttaaactcttttctatgcatctctgtaaatctgttagcttgccattagctgcccattttcatttgaaatctataagtgatgatttaaatgaagatgaatttgcctatatgaaaaatgtaccatattgtaatgcagttggaagcctaatgtatgcaatgattagtaccagacctgatattgcatatgttgttagtgttgtgagtagattcatgagtaatctttcaaaagatcactggaatgctgtgaaatggatacttagatatcttaatgacacttctgatttctgtttgaattttactggaaatgaatctaatgatttctctgtgaaaggctattgtgattctggctatgctgcagatttagacaaaataagatctttatctagtattgctttcactgttggtggaaatgttgttagctggaagtcaaatattcagcatgtagtagcttcgtctactactgaagctgagtatatggccctgtcagaatctgtaaaagaggcactatggttgaaaggaatactttctgaacttggtttaggagatggatctccacagattatgtgtgattctcaaagtgctattcatttatctaagaatagtgtttatcatgaaagagctaaacatattgatgttagactacattttattagagatgttattgcaagtgataaagtgaaggtggagaaaatatctattgtgtgcaatccagctaatattttaactaaagttatacctcttaataaattcaaggatgccttggaattattaaaagttcaacaacagtgatttctttctcttatctcagttattttgttttaaaattctaatgcagcctcttgttttgtaggttctgatatgatttatgtgtatatgttggttctgtttttctgtgtccaagtgtcttgtgtgctctggtctggcattgaacttgtagtctcttgtttgtcttctgtttgtgctatgtcttcttgtgcttcaaggtggagtttgttgggccttgtgaagcccaagtagccttttacacttgcttttaaatgaaactgtgtgttttggtcatattggttgtcatatatataaggcttttatttcacaaagtacaggacgttcctttttcatttggcttttacgcttcctttagtggcatactccagaagcttcatattttgcttttctattcatcttcttgttttctctttaacctagctctgctagggtttcgattactgcacaaatcttgagcgtggtgaggaaaaactgagtgatgatgatataggttgttctgtggtctgtgttttgcgttcctgttgttgtggtattgcaggtggaggtcatctctctctcgggtttgatcttgttggtgttctagaggttgttctctgtaaagaactgtgtgagagaaaggtggaaggttgggtaatgtctgttcttggcattgagtagttctcttttgtaccctgtaaatcttgttttcttgcttacctgtattttaggttttgttcttgttgaaagtttagtcttgtaattattgaggaatgctattggaatatttcctgttactgtagtgttaataaaagagtctacatgttctttgtccttggatgtaggtaacaaagattttatcctagttactaaaccaagtaaatctgtgtgtattttctttctctttaatttttgcttccacgttaattttgagtttgattgtgcgcttaaaactctaacactatggttatgggataaaactttggcattcattaagaatgttacctaactatcataagcatctaatttttttttaatatatcaataatgaccttacaatctatctcaaaatgcacattatgtagccctaaggagatatatataacaacccctaaggagatatatataacaaccaaagcggataggatacctagacacagtaagacacaagctcctccaataattagtcttagatatgaccactggcggagccattcccaagccagtaatgaccatggcatagactaaaattattaatacacttataatttttttttattatatacagttattttattgatacacttaaaaaattgataattgacatgggctaatattagttgctgacttcgccattggatatgactacgatttcatgatcataactgatacataagccgaatcttgtgcaatttgcgcatcataaaaaaaaatactacacattaggcattgcaatataacaaatatttggagaatgtgcctgctcagtgttcacatggtagtctttagctctagaccaatcttgaaaatatgcataagctttatgcaaaattgagagatatccaagtacaccttacatgtatcctctcgtagtttatggtttctacgcctccaaagactccaaagtagcattgcaactcatggatgagtttttgcataaattcaccttcgcacgaggtggaacattgagcttccataaattcatctagtccccgtggcaataagggactcatgctggatgagtttctgcatgatcaaaaataagcacttttgatcgtgtaaagaccattctttgtccccaaccaaatcccgcaatcttctttaactgttgacatcaaaggtgtccttcgtatggttttaacatcttgaggtaaaaacaactgtttaatcacatcctaaccaccaaacagacctaatagtttgggaatagtaataatttttagacttaatgtgtgtgtgtatatatatattctgaaaacaaggtatttcatatagacaaaaatcatgagtcgactaatttttagacaaatatttctcaataattaggaaagatttgttgaatttcaattttatgtctcgtagtgcattgccccattccattttatgcaaaagcaattctatattaggagtaatattgttggctttgatacctgcactgaaccatttcttgtctcgaaagaaatccatacatttgctagctaaataattctacaaatttatgagacatagaaagcagctaggtgcagtaatgtttagatacattttttttctttctgtgcagtttatttgtgcatcaaatttacatgtaagagattggaatttatcttttccaaaaaaagaagaagcttatagttaaaatatatggagaaaactttaagcgaccgagttctttttgtgaaaagtttaaactaatctgaacctggactgaagtttattcaatttgaatttatacgcttcattataaagtggtgtgtaacagctaagtcccccattctatagtgctactataattttgtgtatgttaaagagtggggacaaagggagttggggatggggagaaaagttcctggcgtaactctactaaattatttcattattatttttatcttaaaaaatcatagaggagttatagcaagttatacactttatttatccaactaaattagattatctttgatattattttcttccatcttgaaatgagtaacaactctctatgggtattgggtaaaggggtgtgcttttttataaaagagggaaaaattaaaagaattataaaagaagaagaagaaaaaagaagaggtattttaagtaaaaaaggagaaacaaatagtttatactagaaagttgtagatgttgtggtatctcggactataccacaacttgttgtggtgccaactcggtcaccccgtcaccacaacctccttctcggctgggagcattctccaccaaccatgaacactggggagtcgccgaactcaaccctcaagcaatcaaacagtaaaatatagcgaaaacgtgaatcgaataacgaaggatgcgcgagagataaagggagagaaaacaacacacacagatagctttacgtggaagaaaacctccaagaggaaaacccacgggacttagtccagaaacaaaccactattcaataataatggttacaaaacctccacggcctctagccggagtagctcaacctcacaatacaatggtggaatcaccctcaacaagagttgctctcaacctcttggagacactctcaacagccacaatgccagagacactcttcctcatcactgtttcactggcgtcactcttctgtggacacaggaccaccgcctccatctataaatgtcatatttatagagagaaaaataggtttaggaatttcagcaccctaaatgggaaatgggccgaggtcaaccctcgagaattgggcccaagtcaacattccctttgtcaacacctagggatttgggctagcattaaacggaaccttgtccaacaaaatctcccccttccgtttcaatgtggcaaatcggcaacccggaatccttccggtcttccactgaggtctggggtctcaacacaacccgacctcctcacctcggcttcatcatgccgagttcatgagcccggctccttcacagcaatcttcaaactttattgctagtaccggcttcgtcatcatgtcagaccaattctaactggtgtgcacttttccaagtgtgagctttccatcctccaccgcatcccgtatccaatgatacatcacatcaatgtgcttggtgcggaagtgatacgtcgagttcttcgcaagatgaattgcactctgactatcgcacttcagctcatacacatcttggtcatggccgagctcctggagaaacttcttcatccacaacaactttttgcacgcttccattgtggcaatgtactcgggctcagttgttgacagtgacacacacttctgcagtttcgactgccacgagattgtccctccagcaaacgtcatcaaatatcccgtcgtcgacttcctcgagtcggaatctcccctaaatcagcattcgagtagccctttaactcggccttgctatctccaaagcgaagacacacactggctgtacctcggaggtacctgaagatccacttcactgcttcccagtgttctcggccaggatccttaagataccgactcaccattccaactgcatacgccaggtcgggtctagtgcaaaccattgcatacatcagattcccaactgcagattggtacgggatcttctccatctcctctctgtcttcatctgatctcggacattgcctcttgctcagcttcaaatgtccggctaggggggtgcttactgtcttggctttgtccatgttgaatctcttcaagatcttctcaacatatttctcttgacttagccacagtagcttcttctttctatctcagatgatcttcatcccgaggatctgctttgctggaccgaggtccttcatcgcgaaggacgatctcaacgcctctttcagggcggaaatcttcaccttgtcttgtcctactattagcatatcatctacgtatagtagcaagatcaagaaatcaccagtctcatacctcttcacaaaaacacagtggtcggcctccgtcttcatgaatccatgctctgtcatgaaggaatcaaacttcctgtaccactgccgaggtgcttgcttcaagccacagagactcttcttcagtcggcataccaaaccttcacatcccggagcttcgaacccttcaggttgtgccatgaagatttcttcttccaactcaccatgaagaaatgtcgtcttcacgtccatttgctctacctccagatccatagtggctgccatagccaacactgttcggacagaggtcatcttcacaacaggagagaagatctcatcaaaatcgatctccttcttctaattgcagccttttactacaatccgggctttgtatctcggcttcttgtcgttcttctcctgtttgatcttgtacacccacttgttcttcagagctcgcctccccttgggtagctcggttagctcatacgtctgattctcatgaaacaatcttatctcatcttgcatggccttctcccattctccattctctggactctccaccgcctcatcataactctgaggttcaccatcctcaggaattatggtatactcatcaggtggataccttgcagaaggtcttctttctctagtggggtacctaggccgttcttcctcagcctcttcagaatccggttcttcatcatcatctcggattccggcatcatcagcctcatgctggtcatctacatcgccctcagcgatctcttcactggtttctcccctgcttcagcattctcacgagggacgggttcttcacctcggacagtaacccggacttggggcttcgagatgtcatggatgtttatactagaaagttgtagatgttgtggtatctcggactataccacaacttgttgtggtgccaactaggtcaccctgtcaccacaacctccttctcggtgggagcattctccaccaaccacgaacactggggagtcgtcgaactcaaccctcgagcaatcaaacagtaaaatatagcgaaaacgtgaatcgaataacgaaggatgcgcgagagataaagggagagaaaacaacacacacagatagctttacgtgggagaaaacctccaagaggaaaacccacgacacttagtccagaaacaatccactattcaataataatggttacaaaacctccacggcctctagccggagtagctcaatctcacaatacaatggtggaatcaccctcaacaagagttgctctcaacctctcggagacactctcaacagccacaatgccagagacactcttcctcaccactgtttcactggcgtcactcttctgtggacacagaaccaccgcctccatctataaatgtcatatttatagagagaaaaataggtttagggatttcagcaccctaaatgggaaatgggccgaggtcaaccctcgagaattgggcccaagtcaacattccctttgtcaacacctagggatttgggccagcattaaacggaaccttgtccaacagtagacttgtagttataaaacccataatgataatacacattaaaaataactttatggtttccctaaaagttagtatatccctaaggtcggaataaaacgtgagcctccaagcacaaatatcaccagtcaccacaatatcaggattttcttgctttattttactccacacgcatgtaaaataactttttaggggatgatatatagcccagttgagaaatattgataaacaagaaactaatcttatataatttaaatttagtgatgtgatacaatattattagtttaatttatgttatagtcaatattaatctatttattaacactttcaattttgatggaagaatcaaaattttaaattttacaaaaaaaggagactaaaaatctttattttaaaataaaaggactaaaattgttgattttaaaaataagaaaattaaatcaatttattttaaaataaaaagactaaaattataaattttaaaaaataaaagtaaaaagattgcatttgagcctatttattatttattagaattaatttattagtgttaataactctctctgtctctcagctactccttttgtctgtaattttttctcaacacacacttgaaagtaagaacaccttgtttgttttaactcccaagttggaaacttgcacattgaatttcactgccaaggtattgtttctgctttgtgttcacacagcacactgcttcgctgggatccattgttaatcttagagaaatggaatttttattgttgttatttattgtttaccatggaaaattagaaattgtttgttagtatttgaaaaatgaaggtcgaaggggaccactaaatgggactttgatttccattgtgaccaatggatgttagattgaaatcagaggataagggagtcccaatatttattcaccaaaagcaattgttatgatttgaactttgaagttatgcttgttatcttatttgaagttgaattttggctagctttgaccattttgttgggggaagaaggttttgaatttgattgattgtgaattgattttgtgctattttatagtactcacaaggtgaagaatgaaaatagattagtgttatggcaatggtttctttctgcattttctttctcaattaccaaacttttcttttttttactttgttgagtccagggagtgtagttttgcatagaaagctgcatctgagttttgctttgttgagttcttctttcactttggggtataatccgtacaagtttcggggaccaaaataacagtagaataggttttatgtggtgttttctggtttgtttactgttcatatttgtcaattttgaatttgaatttgattctaaatcttaatttagttttttttcttttttttctctttcttttctgctagctattctctatggcgttttttgttgccaatgtatcattttgttttgaataaatagtgtaagcattaatctataatttcatgtttaataacaatcacatcaagaacatgaaaaggatcttgagaattcatgagtttcacataaacatacatttgtttataattacggaagatctttaatggtagaatgctttcttagagttttgaccctttcaattattgtatcttctttgatagggatgagataaaattctcatggacagacaatgatgactttttatgtttctatatttctcttttcagaaaacaaatgcatttttaaactttatgataaatgcacctatcaacatttatctattttataacttctaataactctcataccaatattacatttttacccttttctcattaaatcaaaataacactacttttatacataagacacatacatgttttacattctcccacttggctcatgtcataaagtaccccttcatgatttaatgataattcattataatgcgcatacataaggctaaaggttccatacattggcctcatcatacatcaagattagaaataaaaaccaatgagtcatagtggttatatgctatcaaatcgacatagttccttccatgtaccactttattagctcttcttcctaatatgatactttaatggaagtttacatcataatgtcccacaataatactaatatgtcttcattagggacaaatcatgtttttcaaaataatcattcatacatgcatgtgtacataaatttgaaaacagaataattttcagaaacttaaacatcattgaattcagagtgtcaataatcaataattactataatgatcaacattcattagctgacataatgctcattcctcatacatgactaataagtgtcttgagcggtaatcccttcgtcaagggatcaactaacataaaattagtgctaacatgctctatagacactctacgtttatgaatttcttttttaacggcaaagtatttcaattccatatgcttagaaccttttgaatacttgtcgttttctagaaaataagactgttgcagaattatcacaataaatttccagtggcctatcaatactgttgaccaattcaagccctgaaataaagtttcgcagccatttagcccgaactatggcttcaaagcatgccacaaattcagctttcatagtggatgtaataattacaaactgcttcgcacttttccattcaaggttactagacctcgtataagtaagcatgtaacctttagtgccttgcaaatatctcagaactttctttgcagctctccaatgatccataccaggattactctggtatctttccaacattccaactgcaaagctaatatttggtcttgtacaagtctgagcatatattaggctcccaactaatgatgcatacggaattgcttccatttccttttgttccaattcattcttaggacattgcatgagactaaacttgtctcctttcttaattggtactggagacaacgagcaattttgcattctgaatctctctaaacctttactaatatatgctttctgagacaaacgcaacaatccttatgatctatcacggaatatttttatcccaatcacataggatgttcaaagttactagagagaaacttcttagtctcatttaaaagactaagatcatcatttgtaagcaagatatcatcaacatacaaaatcaataatataaacttactcttactgaccttcagatatatacaccgatcaacagtgttttctttaaatccaaaggaaacaacaatatcattaaaattaaggtaccattgccttgaagcttgtttaagtccgtatattgatttctaaagtttgcacattatgtgctctttatcattttctatgaaccccattggttggttcatgtacacatcttcctctatattctgatttaaaaaggaagttttcacatccatctggtgtaacactagatcataattagtcaccaatgccataatgattcttagagaatccttctttgaaaccggtgaaaaagtttatttgtagtcaatgtcatctttctgagtgaatccctttgcaactagtctagccttatagcgttctaagttaccatgaaagtcacgtttggtcttaaagacccacttataaccaactctcttgcacccttctagtaactcaacaagatcccaaactttattctgttccatagatttcaactcatctttcatggcatctaaccacttgtcaccatcttcactattcacggcttgtgaaaatgtcactggatcatcttttatacccaagtcaaattcatattcttgtagatataccacataatcattagaaatagtatttctcattttcctttaagatcttcttaatactatttgttgtggttcttctacaatgggttcatttggttcattggcaatagtttcatcatgagcaatgggatcattcatttgttgttcttcattgttattaatcagttcaataacatgaggaacaacaactttactagagctacaagtcaaaggaacttgtactctcactttttgaattgctactttacgtgatgtttcactcccactaacttcaccatcttcaattaacataacatttctagtttctataatttttgtagtacgattagaacaataaaatctatacccttttgacttttctggataaccaatgaaataaccactgattattcttgtatccaatttcttttcatgtgggttgtagtatctaatttctgtctgataaccccaaacatgtaggtgttttaaactaggtttccttccaatccacagttcaaaaggagtctttggaactgctttactaggaaccctatttaatacatacatggcagtctttagagcatgagtccacaatgaaatcggtaaagaataattacttaacatacttctgtccatgtccaacaaggttctattacgcctttctgatacaccattatgttgtggtgtacctggcattatgtattgagcacaaatatcacgcttttctaggaatttggcaaatgtgcccagatgttgtccactttcatcataccttccataatactcaccacccctatcagacctgacaattttcacatttttttctaattgtctttcaacttcatcaatgtaaataactaaagcatttatagcttgagatttatcatgtaacaaatagacataccataacgtgaatgatcatcaatgaaggtgataaaatatttctctttattgaaagagttaacatcaacaggaccgcaaacatcagtgtgtataatttcaagaagctgagtgcttcttgtggctcttttctttgtgtgttttgtttgttttcctttaatacaatccacacaaacattcagatcagtaaaatctaaatccggaaggattttattcttcaccatttttttcattctttctttcgaaatgtgtctcaaacgtttatgtcacaagtaagcagaacattcattcattaaagcacgtttagtaccaacattatgatgcagagtcataagcgtttcaacataaagattatcaagacataatttatataattcatcacataaggtaccattgtcaatcaaatgattgtgcttgtacaaactgaaactaccactaccaaatttaaaagagtaactagctttatcaagtttggaaatagaaactaaattcctagatatactaggtacataaagagtttcacataagtccaaatgatgtccactgtcaaggatcaaactgtaagtctcaacagcttctactggaactttcactctattacccataaatacaaacttttcatttggccttgtggtttgggtcgtaaggaatccctttctttttagctccttgatgtttgacataattgatggaatgaattctctggttcttaattttggtttcctcttgaactaacatactgtgcaattcatgcgcattccatttgtctttcatggtattatagttcatttggaaaggaccatacacatccggtaatgagttcaatatgaactgcaccaaaaaattttcatccacattcattcccaatgacttcagtcttgctgtaatatttgtcatttcaacaacatgctcatgtatagtacgtgaaccatcaaatttcatggtggtcaatgtactcgttagtgtcccagcaagagacttgtcaacagtttgggagcattcatccacaagtttcaacatttcttggcacttttagtttgtggaagagctgacttaatgttgctcgtaatgctcattctcatgtacatcaaacacaatctattggatctttcccagttcttaaaatggttcatttcatcctcagtgctttcatgagtaatagcactaagttcctcttctctaagagctaaatccatatccattacaccaaggtaaaattggatttgttctttctattcagagaagttcagcccattaaaaactgcaacagttgagaacaaggaatgtgtagcaacaggtacttcaaggaataacatttaaaacattaatgctttgagtcatacatatcacatactaacatacttcacatattcaaacatactaactttaatgcatattaatgttcacctttggagatccattaatatacaacattgaaccataatgatactacaaatatttcacgtaatttggcaatgatgcataccccaactagaaatattagccatctttggatgtccaaataaaaccataagtgtatcaacaatgtcaacgttcatgttcatttactataaaacaagtaatcatcctttgagttgatccctaactgtcctatagtaatgaacttcaatataccacaacataaacaataattttataccattcatagcatcacagtcatggtaattgaaacacaatcataatgtttgaaactaatcaattcatcaagaatttggccactttggtgactaaaaatccaccatacttaattccaaactataaacatttcataaatgataattgatttttacactttatcatattctcgacaacttcaataaaagtctacaacttttatatagatttatgccacataatgcgaattcatgaaaccataaataatgggtcttgcaataattgaattcaatagaggcatccacaataattgcataacataaatatatcagtagacttgcatcagatttgatgaaaatgtcatgacgaaaaccaaaaccaaaacgttgaattgaattttcaatatatatatatatatatatatatatatatatataaagtcaccactccaaaagaaaaacatacgtctttattctttcttcaaaagaatccatacatcgttaatggaaagtatctttctcttaatcatgactttcgaaaacttaatttttcaagaatcaagaatttattcataaccatacatgaaaaaacatgaatttccaaacacatgctctaataccaaatgtaagcattaatctataatttcatgttcaataacaatcacatcaagaacatgaaaaggatcttgagaattcatgagtttctcataaacatacttttgttcataactgcagaagatctttaatggtagaatgctttctcagagtattactctttcaattcttgcatcttctttgatagagataggatacaactctcatgggtagacaatgatgactttttatgtttctatatttctcttttcagaaaaaaaaatgtctttttaaactttttgataattgcacctatcaacagttatctattttataacttataataactcccataccaatattacctttttaccattttctcattaaatcaaaataacattacttttatacatgagacacatacatggtttacaaacagaggtgacctgaactttaaaattattacttcaagtggagtgattgaagtctgaactatatgggaagctgatttcatttctttttatgtttcagcaaaaggaagaagtgagggaatttaacccttaattgaacacaataagtgcagtttacatgtttctgaaccattcaatttctcagtcatgttacaaacccaagcaatttttcaatttggagagagggagcactttggttggaagcattccgattattcaaattagatgctggagggttgtgagtgcatgtcttaatgtggatgttgttgcgcatgtgcctaatattgcgaagacgacattggagaaaaccaaggatgtgatagagatggaagggaagttcatggtggggacatatgcaagaacaccaatggtgcttgagaggggggaaggttgcaagttgtatgacattgaagggagagaatatttagatttgagtgctgggattgttgtcaatgcactagggcacggggatgcagattggtttaatgttgttgttgagaaagccaatactcttactcataccagcaatatattctacacaatacctcaggtttgtgcatgttattatatgtctgtaagttatgtcaatgtcttcatctgcatataagtcatggaaaactttatgtttaccaaacaatacctttggtatgggtatacactaacagtgagttgtctatttgtatctgagttatttcttattgtaatatgaatcttcttattcattcatacagattgaaactcaaagggttcattatatatatatatatatatatatattacaaactcaaatactctagaatattccacacaataaaactaactcaaatattctagaatattccacactctccctcaaattgggagatatatattaatcattccaaacatgttaatcaaatcctcaaaggtgggcttgtgtaatcctttggtaagaatattcgtcgtatgctttttggtaggtatatatgacaaacatacactaccatcctccaatttttctttgtaaaatgacgatcaacctccaattgtttagttctgtcatgttgaactagagtttgagcaatactgacagcggccttattatcacaatacaatctgacaagtagggaaataaagatcttcaattcctcaagaagtcttcttaaccagatataccatgggctagagcccgaaattatgcttttgtaatgcttctggcaacaactgtttgtttcttacttctccaggtcacaagatttccccagacataggtacaatatcctgaagtggatctttggtccattgccaagccaactcaatctgcatttgtatagatttcaatcgtcctcttgtgtcctctttgaaagaacattcttcgaccaagggtgtttttgaggtacttgaggattctataaactacactaaggtgtttttccttagggaatgcatgaattcactaaccatgctaactgcaaatgcaatatcaggccgagtgtgagataagtagatcaacttccccaccaacctatggtattgctctttgtcaacttctttcccctcttcaattcccaatttaatattaagatcaactggagtctctattggcttgcacccaagcattcctgtttcttgcaacaggtctagaatatatttcttttgagttaaagaaattcctgccttactacgagcaacctccatgccaaggaaatatttgagaactccaagatacttcagtttaaactggtcaactaaacactgcttcaaagagtttatctcctcacaatcatttcctgtgacaatcatgtcatcaacataaacaataagaatagcaatttttccaccgtcaaagtgtttataaaatagagtgtgatcagtctaagcttggagaaatcatcttcccttcacaacttgagtaaacttcttaaaccactctctaggggattgtttaagcctgtagagagacttcttcgacttgcatactaaactgtctccgttttcaaaaccaagtgatggatccatataaacttcttcatgtaaattaccatccaagaaggcattctttacatgtaattgttgcaggggccaatcaaggttggcagcaaatgatagtagaactcagatagtgttaagtttggcaactggggcaaatgtctcttgatagtctatcccatgagtctaagtgaatcccttagcaatcaatttcgccttatacttgttgatgctattatctgcattaaattttattgtgaacacccacttgcaacctattgttttctttcctctgggtaatgctacagattcctaagttccattttttaagtgctttcatttcttcaaagactgcattcctccattttgggtcatcaagtgcttcttggaagttttttggtatttttgtactatccaaaatagtgttgaaagcacgaaaagctgggaataacttttcaaatgagacatgatgagaaatagggtgagcagtacaagatctagtaccttttttaagagcaattggcacatttaggccggttgcatcagtgcattcaggtattgggttgttggaactaggactctagtcagaatcctggaagtctagaggctcctgaggtgttttttgtctgctataaacttttccccatttactaggaggatctctagtctctaacacagtagttcatcctatctcctacataataactccccctatctccaaaggcaaaggtaaaacaacatactcatttggtttccaagacttatcttcatctaccctaatagactcctcctgaagagaagttgaaggaaaaaaggattgtgtctcataaaatgtgacatccatagaaacgaagaccttacagagagaaggtgagtaacatttgtaacccttttggttaggaggatatcctatgaagacatattgaatagacttaggatcaagcttggacctttgatgggaagtaacatgtacaaaagacacataaccaaacaacttgggaggaagggaagaatgagcctaaaaaaaggaaaggtgtcggtaagacaagataaaggggaatgaaaatttaggacacgagaaggcatccgattgatgagatatcatgcatgcaagacaacttcccccatagatatttatggaaatgcatatggtaaacaaaagagcttgagcaacttcaagaagatgtctattttttctttcagccaccccattttgttgaggggtattaggacaagaacgttgatggagaataccatgctgggtgagatagtctccaagaacaaaattaaaatatttaatgccattgtcagttcgaagaatttggatagaggtctggaactgagtttgaatcatagcatgaaagtttttaaaggtggatgcaacatcagacttatcctttaaaagatatacccaacataccatagaatgatcatcaataaaagtaataaaccaacgagcaccggagatatttttctcgcgggctgggcccatatatcagtatgaatcaaggtaaatggagaagaatcatgatgaactctaggaggataagaaacacgaggatactttgcaaactgaaaaatatcacaagaaaaagaactgggtttttttattgataaataagtttgggaacaacttttgaagataaaagaaattcgggtgtcttaaccgacgatgccacaacaaaacatcattactatcatcagacaaagataatgagtggtgcacaaatttttttgtttcattaggatcatattcaaaatagtaaagcctttcttcctctctagcattgccaattttcagcctcgagtcctgttcctgaaaaacacaagtatggacagagaactctgcaccacaatttaactcagatgtaagtttgctgataaagatgaggttgcaagtaagagagggaacatgaaggattgagttcaaagtattgtgttcagaaagtttaaaggatccctttctagcaatagtagagaagttgtcgttggttgttcttattcgtgacagttgataataaggggtataagaacaaaataaggttgcattacctatcatatgatcagaagcccctgaatcgagaatccaacaattactacgattaacatgaaatgtcataccttgttgagcaacatgactagtttcttcagcaaattgaggcatcaccttctgaaattgctcatactcagccttagagatgaaaacaccatcaggattaggagaggcacgaagctccccactcgtattattagaagagtccataagtcacttcaaaccagaagagggaagggcgatgaggtgaacgaaaaaaatcgctccgcaaacgggtaccggtaggccaaaaaatggtgtttggagtcaatggtggccttgttttcgcgattagaggtgactagatagtgttactgggaaatggcagagagagattattcaatgttgttttttttttaaaaaaaaaaaggcttcagagttacagaacgaaggaaaacctgctcttgataccatattgtaatatgaatcttcttattcattcatacagattgaaacccaaatggttcattatatatatatatatatatatattacaaactcaaatactctagaatattccacacaatacaactaactcaaatattctagaatattccacacaatataactaactcaaatattttagaatattccacatttctaaatcatcttcaatttgcttaggtatcatagaaaaaatctgaaataaactattggtgtgtgtatatatatatatatatatatattggtttgtttgaattaataaaaaaatcatttacattgttagtatatatgtattattaactttaaataaataatacttgtttaataattttttaaaaataaatttgtataaaactttttttgctataataaatagtgtatacattgattaccaaaaaaatagtgtatacattaatactaaaatgtgattcaaactactcacaattttttttcaacatcagccacaaatttaataacctttataatactaattatataataacctgatttaaaaaaaaaaaaaattaccctgctggtaagccacgccagtagcgtgggagccacgctgatagcgtgggaagtgttctataaagtcattttccactggtgtatcacgctggtagcgtgggactcacgctggtagcatgggagctcgggctgagggcctataaaaggccattttcgcgtttttgaagggaaaaacctccctttcttcttcctccaacgccctacctccattaatgaacttccaagcttcataaaccattgtttattgacccaaatcacttcctttaaacaccaaacttactagaaacatgttgtgagccataatccttcatttaattccctagaaaaccccaaattagagaaatccctttctcaagggaagttcatagaactcgagtttggcgaggaacggcggcgattcgtggacacccgagcttgggggagtcgtccttgggccttccttgtcatctttgaggtgagaaactcgagattcaccgtttgttttgtgagttggagttttgggtgaatagtgacccacttgtaatagagctagtattagccttgggtcctttagaaacatgtgtttagaatgttgtaaggatgaaggattagctctcatatgtggttttggtgaactttggttcttggctctatgtaatgcatgtataatagtatgctgagttgcttgactatgttgtgacatgcaagagccttggtttatggttgtgaggtgattgagaggctgttggaacgatgtcttgtgtgtgaaaaggaccgtttaagccatatgtaaatccttgagcttttggtctgtatatagagctttgaactcttaatgttgtcttgcaccgagtcttgtaatgactcaagtgccttgttcgagatgaaatagaccactgagggtctatgagatggcttatgagtgacgagccttgatgaaccttaagttagaagacttagaggttttggaaaggaatgaggttcctttctttgtgacggttgagaaccgtgtgttatgtgtataccttgtatggttgctatggttttgattgttaaacaaaggaacacttcaaaacaaccaagagggggggtgaattggttgaaccttgcccaattaaaaatttaaatcagagttatccaaggatctttatcacattagaatgattcaacacaaaattcaatattcaatcaaatcccctgttcaagaacacataaaacagagtattccaaactgtgctttgaatatgattcacaaacaaaagaacaagtatgtagaactgagaaagcaataaagaacacacagatttatattggttcaccttaaacactatgaggctacatccagttcttccactcaacactagagaggagttccactattgcaaaaatatctttacaagcagttacaaatctctctttgtcaaccctagacaaagttcagcaatccaaaacactattggatccttagagataaccctttcaccctgagaacactacccagttgaaaaaacccagagaaacactatctctatgcttgaaagaaacccattacaatagagtttacaaaaacagaattacaaagaaattgttctacccaatcaaagaacaagaaaagatatcacctgataatccaaatgcatgaacgaaaatgaatctcagatgaatatgcagattatcaactcaattatgcagctttccttgaatcttgattgaagaatgaaacttcagcttatgatcaacatacccatgtgattctatgaagtttctaagatgtttctctcatatagaattatcactaatgaaagcactaagtgtttctgaattatcactaatgaaagcactaatcaaagcaatttcaaaatctcaaaactatttgtttcagtcgcaatgactcttatttataacagagttttctaacagaaataatcgattatacgcgctctcgtaatcgattaaaaacaatcttgaagacttcttgttttcaaacaacgggtaatataatcgattattccgatgcgtaatcgattataccagatagttcaaaaaacttattatgaagagtaatcgattatatttccaggtaatcgattaaatcagacagatctcaaaacctgttatgaagagtaatcgattacatcttctggtaatcgattaaagcagatggaataaaaatatgttttcaaagagtaatcgattatattccatggtaatcgattaaagcagagtaatcttcttttacaaacaattaggtaatcgattactgttatatggtaatcgattaaagcagtcattaatgtatgcttaagtttcaagtaatcgattatttagatgaagcaatcgattaaacagttcatatagattttccagaaaagctgatgaacaaaataatcgatgtcattaactctgtaatcgattatttcagtgttatattatttttccaaaaacttaaagctttttcatcttttctcaatgaattctataattaatcagattaacctaataatcctatatgtatgaatgacgcatgttatgcaatattggattatcagatcatacattttcttttacatgatcaatttgaaattttcaacttgaagcttccttggttcttctttcctttgcatgttgaaagcacaaaacctttctctttgatcttcaatgatgcttggcttcatctgaatcaacattgatatgtgattatatgccttgtatagggcgtgacaccgcgggtgtcagtggtgtaaaccacagagcgagggaagaactgcagagctcggctttgtcaggtaagttcttggtcccttggggatatttctcactgctgtgttccaccatactccgagggagtgatggttgcattcatggtgcatgcattgaattggtgttgctttctcataatgatatgtatgcatgattctatgccttgtatgtatggatacctgcgattagatcttctggccagttagatagatatggacctccctaggagaagagcgcacctcctagcttggtttgctcttgggtgatgatgatcccagggtgatgatgatcccttaagaccaagagataggtggttccgtcgcggttgaaacctattctcggaggtgccatatacgtgtgtccatgcgtaaggggtagctcccgatgggatggcatgggtgtgagttccggtctcacactaaggtttggtgttgatgatgatacaccggcgtagttccgcagtgtacactagagttagatgacttgcttgtattgttatgagaggccgggaggccagagctgattgtgatacctgatgacgtgtgtcatggaaagtgagccagggtggaggagatgcctccaaggaccctgagcttactgagatgtatatctcaccccgtgtggggcttatgttgtttcaggtgactcttctgacagagaggagcggtctcagggcgggaggccctagtagagacaggatctgctagaccgtgtggcagcaaggagagctgggtggctcagtgttgttttgatgaagtattgtatccttgtagagggaagatgtgtgtgtgcacatatgtattcttttgtattgaatatgctacgtatgccctcgtgtgaggaaggatctatgagatcaaaagcactcgaatgcttattcttttgtatagacacttcaagtgtcagatgatgtatgtgtacataacccgtttatgttatgtaattgatgtttcctcctgattatatttgttgagatatttgtgtttatctgcctatggttatgtttatgtgattctggatcagcaaggactagtgttgccgtgatgtataagttttatatgttccatacataatgtaatcaagaaatatggttttcgattatgtttccgcaaaagttttaattaaagtgattaagcgttattctgataaataattatattaatacaccgggtgcacacggggtgttacaaattacctttaaattaattaaaagtgtatttatttgttaacatgctcacatttattaaatttagccaacactagatagataaccctcataaatttccagtgattttcctttcaagaaaaattactctcttaccccccacccctacccccacccccacgcccacccagttgcaacttgcagcagttctttcttctttcctccaaatgccaatactttctcaccattcattgcattaccttaactaataaatagacacacaacgaaactcaaaataccaccctcagaaaacacaaacaacaacctttgacacaacatagtggagcaagaagaatcgaagtagtttggtttctgtttttttttttttttttttttttttttttttttttttttctttttctcctatgtaatgcatcagaagaaatccgaagtccagatcggaaaagaaagcagcggcgtctcttccgatttcaaccaccacccactcccaaccctaactccgaacccgaaccaagatgttctccaatcactaacctccaccgcaccctacaaaagaccttccctcaccacccaaccccatctctccaaatccccaaccttacacaaattcccaaccctaagaccacgccacgtcaccaccgccgccgccgctgccgccaccgttctctccctcctccgccgccgccaccgtctccgcctcttcctcttcctctcgctccccttcttctacttcctcgtctcccatcccacaaactccttcctcctcgatttcctctccgccttctccttctccgccgcgctcttgttctctctcaacctcgccctccctcgaatcccctccctccgcctcttcctcaacctcaagcccaaggcccggcccagcctcaaactcccaatcttctggaccgtgggagcccgcccaggcccggtccaggctcaaccacagcccgcgggccttcgcttctccgtggtgccctacgcgaacggcgacgtgtacgagggggagctgaagggagggaagtgttgtgggagtggggtttactattacagtatgagtggaaggtatgagggggattgggtggatgggaagtacgatggattcggggtggagacgtgggcccgggggagccggtaccgagggcagtaccggcaaggattacggcacgggttcggggtgtaccggttctacaccggggatgtttatgccggggagtgggtgagtggacagagtcatgggtgtggggttcacacgtgcgatgatgggagcaggtatgtcggggagttcaagtggggcgttaagcatggccttggacactaccattttaggtatggattgggggaggtttgtgtttaattgaagtgatagagatttgtgtttgaatttttttttattttaaaagtaagttggtagtaaaattctgtataatttttttttattatctaataatgtaatagttaggtaaggttgttttaattcacaatcaattctggactcagaattgatttgccagtgtgaaactgaacatgtgaatatttgcttaagattgggttagttggtgtttcgacgtgattctggattatcttacttgaatccaaacatgtctgaaatcagttggtttgtagtagatgatggctgtttgttggctttgatttgttggaagttgattttggtgtcatttattggtgtttgattgggatttggatgtgaatggtggtgggtgtgttttttatttggtttgttgtgtgtgtgtgtgtgtgaatgttttgaggtgtttttggaagggtcttggtgcttggtttggttttgtggtttcttaggtttgtggattatgacaatatcttacttcttgaatgatgtctagctgcttgtgtgtgcgcgtttttgggggtggggtgctttgttgtttagctgttggtgtttagggtttgagaattgaggatgatgttatgttatggaggcttttgtaggatgtaattgtaaactgatcggatgtttgttttgttttgatttgttgtgtatgtgtgtagcttttgtgagttagtttggcaggatgttggggcttgatttggttctgtactttgtcatcagtttcgtaggtttgcctcaatttctttgttcaataaccttttactgctctctgtccgtgtgggttgtgttagggcatataatcttgaatgttggattgtcatccatttctattcagtttttacagttgaaagcatgtgcataggggataaagatacacaaaagcttgaacagttgtgaattgttaggtgtgacttatgcgttgtgtgtgtgtgattataaacttatgatgttgttgattggtgtttggcaatcaagcatggtgttgttggtgttgttttttattttgtttgttgtgattgcgtgtatgtttcggttttgtttgttttgcatgtatgaatgttttataagatgattttggcaggttgttggtgcttgatttggttttgtgctttgcctttggtttgacaatttcttccttctggaataatgtatgttgctctatctgtccatgtgtgtgtaggtcttgctttgttgttgacatgttgtttggctattggtgtttagtgtatgacaattgagaatggtgtgatggaggcttttttattggatgtaaactgattgcttccctgttttgttttgttttgatttgtggtgtgtgtaaagcttttgtgaattactttggctggatgttggggcttgatttggttatgtactttgtcgtcagttttgtagatttgctgcaacttctaactgtaaacttttgctgctctcgtgggttgtgttaggttttattttattatcttaaaagttagaataccagtcatttcttacagttgaaaccatgtgcatagaggataaagatatagaacatgtctttgatttaatatgcttcagttgtggcttctgttttgtcaaaagtacctgtaggcctttgaaattttacttggcttgggtcgtgtatttatcagttatgtgtacctattggtaacaattgttgggcataatatgtcatgcacttattttaaagccattgttttgagattttttaggatgttcatttttatgtatctttagccttttccgggaaggaagtaagatttaaatagactgaatactaataacatactattctaatggtagtttattttacctacattggcatttgtctgccaactagctgtgtgaaagctaataaatgggagtttaatattgaaatcaaagaaaagatgcagtaagcatgaaatctcataatgaagttggtcaaattgctttgaataaatggcctgaaactgatgctcttggttttaatattgaaatcaaagaaaagatgcagtaagcatgaaatctcataatgaagttggtcaaattgctttgaataaatggcctgaaactgatgctcttggttcaaaagcacctacaccacccctgatgggacctcatatggggaattaagaagaaaggaacaggcagcaagaaaggaaatgccacttctttgtggaagtatactgctattatatgaaaagccacattcatttgtggtgtctgattactaatttgatacaaaacatcagtctgaaaacctttccttcttattgtactacattttgagttttgaaacggtaaatgtctagtgagtagcaagtataagtttataagtttgtaggggggaggggccatacagggaaaacaagcatacttcttaccctgatcatggtttaaagagacccaccattgcaaacatttcaaacattttgggatcagtaaaacccaaagggaatggaaggggtaaagattgtagaattatcaatggcggtatgaaataggattgatggatatcacatatgtgtgataattcctgtatttgtaatctttcaggtgtttgtgtgacatatcaacatcaacatcaacaacacctttaacccaagttaattggggtcggtggtagataaacccaatgagaaatcgtaaatgagatagaaagagaaaagaagaaaaaagtggaaataagacaaaagagagagagaaaaagggtgaagggagaaaagaagagaaaaagaactaaaacaatggaatgactggaacatagaactactaatcggtttaaccctccaccaagcttatagtttttttccactccgtcctaacacatatcgtccgccaatctatatcccactctattaggtcttgtttaactaccttttcccaggtaagtttcggtcgacctctacctctttttgtgtcgagttcttggtaacaaactcttgttcttacgggagcatccagtagctgtctcataacgtgcccaaaccacctaaatctatgctctctcatcttttcacatactggtaccactgatacctttcttcgaatatcctcatttcttatcttatctatcttcgtatattcacacatccaccttaacatccttatttatgctacccctattttatactcatgttgcttatgtgctggtcagcattctgctccatataaatggactttttccatcgaagtgaaaggaaaaggtgatggaagtattttatgatattattgtatttgcttttgagagggcgagccctgacacagcggtaaatttgtgtcttgatgacttgttggttatgggttcgaatccggaaacagcctctttgcatatgcaagggtaaggttgcgtacaatttccctcctccttacctgcgcatagcgtggagcatccggacaatggggtatgtagttttaagtttattgtatttgcttttgatgtgctctctttatttatactattggttgatgagaatgagttcattttcattatctgggtgaacaatttgttatgtccttctatggaagaaagaccaacacaagaggagagtagaaaaccattttgagggaatacattatttccttgttattttatatttcttttgtgattcattttaataaaagatcaaatagttatctataaaaacccctaatacattatttatgtttcataaatttcaagttggtgaatcttgacacaaattttaaggggttgtggatttttgtatattaagaatacatgagacaacaaatataattactaaaatgcagtaaaaactgaaagattaaaagtgtaaacttccatatgacccctatttgtatgtattcatgttcttgggacttatcttcattattgctaatttcagtttacaagggaaagagtatctgctcccaaggatagactcagtttcgaaggtgctttatacctctcaaactttaaaagtataggttattccataataataacacaacacattccgaagggacacataatctcgagttccttgcaagaagctaattccacaagttggcctttgttaagcatctacaatctacacataccttctgttttttcatttcaaaatggaatgtgctgtcttgggcgtgcattttatgaaaatcggtgcttaatcctatgatgcatgaatacatttttctgattttttcttgaatgtaggttcctctcttctcaggatcattggtgcattattgtttaattgaattacacagagctttgagtgactgctttttctttgctcaccagtaagtgtttttatttttgttggaactaattatttctgtttttatcagaaatggcgatacgtatgctggtgaatacttcgcagataagatgcatggatttggggtatacagttttgctaatggccatcgttatgaaggatcctggcatgaagggaaaaggcaaggtcttggaatgtatacatttagaaatggagaaacccagtctggtcactggcaaaatggagtccttgacattccaagcacacagagtaccacctatcctgtttctcctgttggggtcaatcattccagagtacttaatgcagtgcaggtacacactacattttatgatttagtttaccttaacatattgcttaatatcatttctcagtgtatcattaaagaaaaaagaagtcggcatagaatagtctgggtgatatttatgtcaatggcataatgatgtgccaattttttctgagcaaattgttttaccctctcttgagagagatgcttaaattacactcccctctcttaatcagggaatacaagttgcacggtaataattttcaatatagacgaacctcttaaacaattgtaaacaattattaagcaagagagagagagaaaactctagaaagttcatttacattaaaatagactcaaatgtaacttatatccatctttcaaggagaagtgcataatttaagcatttctcaagtgagaaaaattattctctcttttgatgtgaaatgtgatatagttaagttacatgctttattttaattttttatttctgaatctacaaattttttatattggtttccttgttctatatttcttggtttcttatcactgtatcttaacgattgtttcactaattccaggtaaaaaatagtattactacacccctagaaataaatagccagaattctcacagattttagctagattcaagagttgttggataagataatactaacagtccctcatttatccaatagttaataagtgtgccattcattttgtcaaaaattctctctgcctacaactttccatactattgaacatttacttttatacgtatcaaattagctcatttgtgtagaagaagagacaaaatcaactgcaaacagttaagtttgcatcattaggagctttcattattaatgatgtatttcctcgtgaaaaaacaggaagcaagaagagcagctgagaaagcctatgatgtggccaaggtagatgagagggttaatagagcagtagcagccgctaacagagcagccaatacagctagagtagctgctgtcaaggccgtgcaaaaccaaatgcatcatcatgttaaccgcacgagcatcccaattcccattgtgtgaggctgtcagctgcaaacttttgatagtagagatgcactagatcgtcggaagaggtcggtagtttaaactgctttgtttacaccgtcatcatcaccgcaggctgaatgaaagcaagcagatttattatccatatgccacgagtcttgtatagagggaggaagggtgatggcttccacatggtaaaaaaactacatatacatactatattttttccctttgcctacattttgtaaaatttacttagatgtaaatgctggtgtgcgggtgaaacctcaacccagctactgttgtaagatcgcttggtaaaataaggagagaaacaaacatctagcctaaaatgttctattttttcccacttgctatttttgctttatctgactttggaatgagatatgtttcatgtcacgtgttaactagagttttctattggttagataaggcattgtgtatgttaaaattaaattgtaaagatgagggtttataactatattttatatatcagtaatatcaataattttgtttggtgtaaaaggttgaaagcatgattggcttaaagaattttgggtgtgatgttttgctttatctacccaaatgtctgcaccttaatgtatctgaaaacaatgctctttattttattgattgggttgcatctttagtcggtggaactgggaaagcatgtgagaaaagcagagtagggagaggaggtttagcttctatgttttcatatacttagtgcccatttggtttagcactttagcgagttagaggaggtttagatatcattcattttgaaaaggttgagaaagaaattctaataaaacgagtatttttttgttattattattgggaagtgttagaatctattttatattagaactcaattatgagttgcttcttgccaaacttcattttggattctagaatcaccaattgaaacaccctaagggcgaagctagattacatataaaaataaagaaaaataattattttggggagggtgggagtttggctataacgaatgccaatccaagaattgcttgttaagtgtagttatactgattgcaagtaaaatttctatatcttttaaaatatattgtttattagtgctagttaagagaaatattaacaatataaattttaacacttctaatcataatttttatcatcaattaaaatatattaagattaagaaatgatgtggattttaatttttatttactaaattttacttgattttataattttaataaatttcagttaataacaaaaaatgtttaaaaacatgtattagaaagaagtgttaacactaatgtaaatctaattgttaaacatttagaaactgaatttatcagagccatagtgagtttattgtgttccgtatgaattttctttcgtaagaatacaactttttttaaatcagaaagctgcttatttattaaataaatatttattttaacaaattaacttaaacaaactgatacatgactgatccatgtatgagtaatttataagtgagtagtgatatgtgaatgttctatcattctaaatacattattaatatttaatatttgtttattattcttttcttatcatattatgttatttatatttatattaaatcaatctttattgttgatagttgaataattttttaaaaaaattctttaccactatgaaagcccgcaagatggaggcctgtggctgcactttctgtctgagacatcccccataagctgttattcgggatctactaaacacactataagaatttcttatacactatataggcacagtgcaatatcagaaatacccttttaaaaattttgataaaatagaattttttttttgaattggtgaaggcgctttccatttgtctgtcgagctctctcttctccaagacctactgtgcattcttccgccgcagcagtagcttccggttcggtggtctccggcgtcattgttggtgttggtgggcggtgtttgcgtcgtcgacgaaggtgagtctcgattctggtaatgggtttgtgttgcacggatgagtaaatccgtaaggatggcacggattggttaagccgtaggaagcgtttgtcatgcatacggatctgataatccgtatgaacaatacggattgatcaatccgtgcaatttatacggattatatgatccgtaattggtgtatggggtccattaggagtgcacggattagctgatccgtatgaaccttacggattacacaatccgtaaggttcatacggatcggataatccgtatacatgttagggatgatgaacaatatgtatacggattagcttatccgtatgaaccttacggattgtgtgtcccatccattcatgagcccaccagagcctggagagccgccacgacatccttgcagggtgactactattctacatgaccacagagctcctgatgcaggtcacagtgttcctgctcccccttccagccatgttgatgacatcccatctgcgacagatggagatgtgtcagcttcagatgttgatcgcatagctccacatgctgtggtactactttatgttaacagctttcagtttccaaggttgaattaatttatttgcaaacactgactgctatattacttttgtatactgtgatattgtttcaggatatgtgccagacgataggagacggcttgcaacacatgttggatatgaggatggtcacccctggcacagatgcctacgcaactatacagcacctgctggagttagcccggagtgtcactcagcatggatatgtgtatgtgcgatccagcaggaggaggggtactatcagaaggcggattcatggcagagactgattgactttattgtttttttgtaatgaaatagtggtcatgatgtggtgaattattaactttaatgtgttactagtactcgtgtatcatgttttggacatcgaactaattcaaatttggaatatgatctaattttgtgaatgccttatatattgggctttttattgtttgtacaaaagtacacttacaatttccattatcctacaatcaacattacatagaataccatcatgtaactgtcaacctaaattaacatatgctttggttgtaacaatggatgtagtatacatcaattgtcgatgcttgtaataagttggccaatcatgtgcttcagtagaacaatgcattggccacaacaacgcagttgatgggatagggcagtcatcagacaattaaacctgtttggaaacccaaattagtaccacaatttctatatattaaccaatacaaataatgcgatccaaatacaaactaaaagtaatacctgcacaaagtggttaccaaacacatgaccaatacaaataatgcgatgcatacatggatctctcggtggttggcttctaagcgggaaaaaagtcatactttgttggagagaaagtgaaacgacaattacattataccttgaagcaatgacataacccatgtcggtgatatccatccacttatccattgttacctaaacaagcattgtttaaaaatgcgttaaccactggtgtttaaaagaataaacaaaatgaaaaagtcttacatttgataatccatcaaccagaagggaacgcttcaactgctcaaacctaggaaaaccaccaaacaatgctatatattgatcagaccattctgaaagttccttaagcaaatgattgcgtacaacaggccaacaatcttcaccataaccaaggagaccagcaattacacgatatccacaatttccatcagctttaacatcactgatgttaacaacgaatttctgcataaaaggaacaaactgatcaagcataaggatgtggttgctcttctgtggttgatcattcatcgaatgaggcatatcttgtgtcgagtaactattttgcactgaatgcaattcatcaacatattcaaaataagagggatcccgcttggtggatatttcatgccttttctgtttattttttggagccccttttgtttttaccttttcagtgggaggatgcatggatgtttggtctggaaatgcaagttctttcaacttattcttcaaggtcatttttccgcaaaggtcaagcttctcaaaacggttggagattgcctccatctcttgggttattcgaatttcgtcggtcataggtaaaccttggtctgagaaatttaatctccgccaatataaatgaacactagaaagtggtatgctgcctacaaccttggctaactcacatgcacatgggagaccatgggtacttctcataacacacccatatcgagatggatttttgcctgcataaggaactcgttcgtattcagcgttaatctcatgtaacgcatacctggacaccatgccgataagtctcttgtacaaagtgactttaaacacatgttcgatcacatgggtgcttacttccaaagatgcctttatttcagtatgttgcaatgtcatcatgttgttcatggcatcccagacagaacataaatctccaatgctattttgtagaagccttttcaaagtccaatgtgcagactcaactttgcatttaatggcaacacattaatcgcacataaaacaactaatatgttattaaccatttgacaatgtcaccaaatttaaaccatgtcatacctgttagttgtggtattaccaagatgcataaccttgtttgtccatgcggttacaaatttttccttatgcggatccaaccatgtttccttaacgtaatcaataaacgctggccatggtgcacaagcaatttcaaacttcttcacacaatcatcatatgaattctcagtacgacaatcaacaacagttctccatgcatccatcacataatcccaagcattgttctgtcgaatataagttttgcattttgccttgacattcttgtcaatgtgaaagcgacacaacaaattggtacattgaggaaaaacatttttgatggcatgcatcaacgcagcatctctatcagtaacaatcacatgtggaaaaaattcacttttaaagaaaatccctctaaagcgctcaagtgcccatacaagattgtttttacgttccgcgtctaaataggcaaatgcggcagaaaatgtcatccccgtaggtgtgacaccaacaatgtcaagtaaaggcaatctatacctgtttgttttgtacgtgctgtcaatcaagaagacaaaatggtatgcattggtcaatttcactgcatctggataagcccaaaataagtcacgtaccacattaccttctttcattctatgccaatgaacatacatgtcacgctgaagaagtttcattaactgttgcatttcaatgttatcacctcttatatgcgtgcgatatgcatatcttgcattgtagatttgcttcaaagttgtgtaattattagcattgtgctccttcaaagttaaaagaatattcttcggtttcaccatggaccttgtcatatcagcaacaattatcttctcatcctcagttagcctaccagcatatgtgtgtccacataatgagcttgccatactatgattatgaatgccacataatagctttactatccaaccttaccctcccgctacaggttttgctctcaacttaaacggacactcacattttctactactccctgttgttggtacaaacccctttttgaatggtctatattttctactcctttgacaaccaattataacatatgtagttgttcctagctttccatttgtcatgtcactcctcaatatgacaacaacaaatccattatcatatgctacactacgagcccatctcaatacatcatcacgggaattaaacacctgcacaaatataacattcaacttttattaatattttcatacttcaacacattcattaaacaagtttaactacaaatatatacctctgatgtattgaaggctgccaaacaatcaactgaacaattattatcttcaacaccatcaccttcttctccaatatcttcctccaaattcatatcctctgacataatattgtcatatatccactcatcattctccatcttcacaaaaaaatacagctatttataaatttattcaataacaccatttatacacattaaaacaactaaaatactttattataaattctaaaaacattcttctcaatttaaataaaccctaaatttataaataagatgctatacggatccatcaatccgcacgctacatacggattaggcaatccgtatagaacatacggattaaccaatccgtaatctctatacggattgcctaatccatatgtaacatatggattcaccaaactatgagaaacgtacggattagttaatccgtttgatgttcacggatcacttaattcgtatgtagcatgtggattaacgataccatacgaaagatacggattagttaatccgtttaattctcatggatcacttaatctgtactgagtaaacggattaacgaatccgtatgatatgtacggattgaaggatccgtatgcaacaaccacattcactattccgtatctcacataaaacttgcggattacgtaatccgcacgacaccagatataaacttacctcgcacccaccgctaaaaatggcctctccggcgactcccactgctcaggctagctaccaccgcccacaactacctcctccaacaccaacacctccaatgcacaacaaaatcgcagccaacgttcaccaaatcaaaagccaaatgagcacaactgttcaaccaaacagcaacaataaaaataaatcgaggggcacttttggcattttaaaaataacatatggtgtataagaaacttatatagtgtataaagtagatcccctgttattcccttgtcacctcatgccacctcatccatgttgttaatcccattattttttcatccatttggcttcactttaatctgaaaataagcatgggtatttgcggtgtgatttgatgtgattttaatttaaaattagtttgaataaaaaaatatgatgtagtttgaatcagttaagattatttatgaaataaaaattaaacaaaattaatcttttgtggtttaatttgattttattttgcggtttaaaatttttactaatgactattaaaaaatgtttaacaaatttgttttaattgtaaaaaatttaaataataactaattcaagttacaatgattaaactttaaaaaacaaggtaatacaaagacgccaagacgcgtgggagagagatactatcgcaaacgtagagatgatcgcatggagagcaattttaggcattagttttagggttgtattagtgtatgattgtatgtaagtgtcattttcacaaaagcttaaactacatgtcggatacgtatatgagtcctataataattaaactaatgagtgtggttcgatttagtttggtttgattttcgatgtcaaaccaaaaatcgaaccgaatcattcaatttaagaaaaacaaaaaccaaaccaaattgatatccttcaatttttttgtggtctgcgattttttggattagttttcgattttacgttcggtttggtttggtttgaacacctataacaacagttttgtgtacattttattttttaattttgaaaaattattttaaaacatttgcatttaaccttagccgaggaggatgctcgggaggaaactatgggaagattttgattaagttcaaccttagccgaggcgggtactctggggggaattattcatgagtttttgagttccaccttagccaaggagggtactcgggagagaaatgttcgtgagtcttcaagttcaatcatagccgatgagggtactcgggagggaactgtttatgagttcggacctgttgatttataaccaaaggcaaacaaacaaaaataggttaggaaatatctttattagtagtcagttattgaggtgtgcctcgttaacacctccttagaaaaaaccatttcacatttttataaggataaaaatttgtggtaagaaaaagagtacaccacccattacagaaatgcacctaactatgataaactttcaaatgtgtggggttctaagtcctcgggatgacctacccggatagctcttctaacttgtacgcttcattcttcaaattgtgttggatcctaaagggtccttcttagttggccgtcagcttcccatctgatggggctttcgggcttcaccacatcctctccacgctagcttagatttgaagtgtcggatcatacgccgcttgtaaacttcggtcatgaggaccgcatcttctcgtacttggtcaattaggtacagatccacctgtagtgcttcgttgttttagacatcggcaaagtactgccttcggagagagacgtctcatacttcaactggtagcattgtgcttgtcctgtatgtcagtcgaaaaggggtttcctgagtgatagattgaggggtacatctctaagccaagtgacctttgctaactctttggcccatctctccttggttccatctagccgcttctttagctcgctcataatgaccttgtcggccgccttggcttgtccattggtctaagggtgctccaccgacgtcactttatgcttgatgccatgaacgctcaagaatttctggacctcttgggccgtgatgtttgctagtggttcggcctcaacatacttggtgaaataatcaatggccactaggagaaatttccttttccctggagtcatgggaaagagcccgagaatgttcattccccagatagagaatgaccaaggggaaaccacagagtccatctcttcgactggacgatgtatcaagtttccatgtctctggcattgaatgtacttctttacaaaatttgaacagtttgtcctgagagttggctagtagtatccagtcctccgaactctggtggccatggtcctttccccagaatacaaacctcaaatcccctcatgcagttctcagagaagatagttagcttggtcttggtcaaggcacttgagcagaggtgaggagaaacctcttttatatagttcatcagccactaaggtgtacttggcggcctgcattcttatttttctagctttgctcttgtcagctgggagtatctcatactgcaaatagtcgagtatctcctttttccatcccaaaggggcttcctcaacttgtagacattcttttgttgagatgctgggttccagcactgattgaagaataaaggttttaagttgtctaggcttaggggaggtagttggccgagctaactcgtcgaccttgtcgttgactgttatcaatacgacaagcacaccaaattgtccaagtaataaagaaacagtaagaccgagtgtcgattccacggagactttgcttgtactcagagttaatataaaattcaataaagagatagaatgcaaacacttgtgggtaagttgtcggctgatacagagttgtgtgacatgttgagggctcaactcatcgaaactacccttgatgcaatattaaaggtttttcgttattcaacattatttccactcaccttcatctactaagatattctaaccttgattccttaagcgtaagaccctaaatcgcttaatttcactcctaatccctcaagagttacattaaccgatttgcattaataataaagatgataacctaggtcaaacaaaatccttatatccttagacatgatattgtttagaagtatttttaagttctaaggcaataactattttccaatgtattaaaacctataacaaagcatgcaaatggggtgatcaaacctctaacatgaataaagctcagaaaaacaacaataatacgaagataacattaaatagatagttagaatcattacatcaagagtgttttgttgttgagctcccaacaatggatgatttagcctcccatggtcatgagagacttacaaatacaaaaaggagcaagatgaatggaagaaaatggaagaagggtggaggaaggggccccaagtgagtgggttttcctctatttccgttccctagctcttttctgtccaacaccctgagtgggtagtgttttttcctttttatacttcaaaatgtgcactatcaggcttttcagaataggttgcgcgttgagctggctcttttcgtgttaatccggcttgcatgtgcgcgttgagcctgcatttgcgcgctgagcctgcatgtgcgcgctgagcgagccactccagatcttcaatccatctttcatgtctctgttgtatcactctctacaaaaatacaaccaacacactataaatcaactaattttagcatctacttgataaaagctcagaagaagctaaatttctacattttactcacaaaagaaggattaaaagagggaaaataagataattgctatgcgatttacatgtaacatttatgtatgcatagcaattatcattgacctctcggcttatatgagttacttgcacttcctcaaattctcccttaagcttctcaaacgtgtggtagtattttaagagttgggggtctcaatttgaaacagcttgttgatatgctcggtggcaatcttagagtcacttcggcaccaggctcttttagcgctgacctctttagcgagccttagacctgcatggagggcttcgtatttagtatggttgcacgtggctttgaagccgaagcgtagcgattggaccatagccacatcgttgggtacttccaaaataaccccgactccgctcccatgtcggttgaaggagccatctatgtgcatcatccaccatttttgctcaaactgtggtggtgggggataaaactcgttgatgaaatcggccagtacatgtgcccgaataatacctctccactcgtaggcaatattatattttgagagctcaattgaccatgtcatcattcgtccagccaacttgagcttacgtagtatcttggctatggggcaatcaatctgaacagtgaccttatggctctgaatgtattgtcgaaggcggtgaccggcattgaccagtgcgaggtctaccttttccatcacttgatacctcgtctctgaatcttgtagtacctggcttacaaagtatttcggtatcttctcacttccttcctctttcaccagcgtcacgcttatggcctcgacttagaccaaaaggtaaaaatcaatgttttgccaatgtttgatttcgacaaaacgggtggtgttgccagtgttacctttatctgtcgaaaaggctttttcacagtcctcatcccaggcaaagtttttggcctttttgaggaggttcataatgggccttgccttctcgataattcttggtaaaaaaccttgacaaggaggctatcttgttggctagtcgtttggcctctttcacattctgaggactcttcatctccaagatggcttggcatttgtctgggttggcatgtattccccgatgggtgagcatgaaacccaaaaaaaaatcctccttctaccctgaagacaaagttctcagggttcatcctcatgttgtagttcctgagttggttgaagacttcttctagatctgtaaagtgggttgtcaagttgttggatttgaccaccatatcgtccacatagactttcaagtttcgtctgagttgaccttggaaaactttgtccattaagcattgatatatggctctgacattctttaacccgaatggtatgactttttaacaaaattttgcggattcgatgatgaatgttattttctcctaacctttagggtccatccttatctgattgtagcggaatatgcattcaggaaacttaacaccttatgtctgaccgctccattgaccaataggtcgatgtatggatgtgggtacgcatccttggggcacgccgaggatataatatttttaatattgcaatgtaatcttaaaaaattatatcctatttttgaatgcaatattaaaaatattatatcctatctttgaatgcaatcttaaagataaatatcttggcaagatcaatcttctaatctccttacataaaatctaaaaaataaatagaaacaaatcttcttaattccatgtcaccttgaatgatatcaatcttcaagattcttcaaataatcttatcaattatgttgatcttcataaatccaaaatatcaataacttcaaaatatcaataaattcaaaatatcaaataattatcatcagtgcaataagtctaataatgtggtattcattgtttgttatcatcaaaactttataaatctttttatgcataaagggttcaacaaatatccaacagttcgtcctgcactgggtcaattgccttgaagtcctcggttgtgaaggttataggcggcatgttcggtactcagtgttgggagatcatgttgatggatcggactctgtggaggcaatggccccacccttagcgaagcctccggctatagtgtttatgactcacctcggtggatcaaggggtctttcttctctctccatggagtggctttggctcccccgcctttctaattgtcctgcatgttctcggtctcttccccgactagattcaggtctgtatcttccctcgagcctgtacgactatggcttatggacaaaatcctttaggtggtcgagcttgatgagctcctcatcttatctttcaaggcactacactcttatgtcgagtgtccacaattgtggtggtactgacaaagctttgagtagttggcctttggtggatgttggctctcttgggcatggccaaaatgttgacagctaaggcctgatccaaaatgtgggatttattggcagtaagatgactgtattgggtgaatcgcggctcatggcggtcggtccttccttccttcgtcacaaaccttgttggagtcgagcctatcattatctttcttggccaacacggtatcagcccgcacctggtttcgatactcgacaaactcctccatctcatgtacttagtcgctctcgtttgcaactcgacaagatcagatgttggcttcttgcataggttatttacaaaaggtcccacccgtaacgtcgttatcaagtggtgcatagccactgttgggtctaggtttcggatattgataagtgccctaattcaattaaattcaggtttcaaatataggcacttatcttttgatttcaaaaactttgcttataaacttgccctaaacctagttaaattatatttattacttgtatgaatgtagtttttatattttggaagattaatccaatcatgttttgtattttgatagattccgtggattttcgaggcttccgaataatcatagcaaacctgggaggtgcagaaagcaaatcagacaaaatgaggcttctggaggtactttaactcgcccaggcgagtgaatatagtgtattttggtcgtctgggcgagcagaaactgcaaatgggccttcaattggccaagtggacgtgcaagttgggctgcaagttggttttaactcgcccaagcgaccaaacaaaggcaaaaattcgaccaggacacccccctataaatacccaagcacccccaaagctcaaaacacttcttgcattccattttctccttcctccgtgctctcaagcttgttctttagtttagacttttaaatattagtattaggtaggttaggaaagtgagagaagtgagatttagtgtggaaactctgccggaaagaagcggtgatggggtccttcatcaattcttctcttaaggaggttctctccatgcttggttagtttctcttaaagattggatgtaatcttctacttttaagtatctcttttaatatttatttttgcataagtcttttctatttattattggtaaatttattccgtacttaacgtttgattctacttgatcaatagtatcacgaacttaaattctaagtgagactggaaagtaatcttagggtttgaactgaattaatttactctttacgttacgttgctaggaatagagcataacgtttagattgcaaataagcacgcgattatgattgtaacgctgggatatttatttcatatgcgaggtatcaatatttggtaaatatccttagaactcgattgcgagtaatcgattcgaggttaattaatgtgtgcatcaataataatagaaaatgatttatacatgatcatattaattggatgccgaagtacgaatggtgaaatccaatcctacgtttttcttgaattaatcattttattagtttccgtacttttttagttatcttttttttccgtaaaaatcatcaaaacttcgaccatactcgttgtacataactatttaactgttaagttttatttggattaattgagtagcacaagtccctgtggagacgaacttttataaattttgtaacttacaacgacaattggtacgcttgccaaaagtctaacaagtttctggcgccgttgccggggacttgagttgcttgcttagttctttcaaatttaatttttcagttgaatatgactttttctttattttcgttattttaattttgtataaattctcttgtattttattttgttttatttttcctaacctcggtacttacgaattattgcaaagtttgtcatttttccttttgaggtaaatttcttgcagatatatcgttattaaatttagaaattaccaagaccataaaggaaaagaaacaaaacaatcaaaaagctactgagtaaatcttcttctattttgattctccttcaccagtaaagccacctgtaatttatattatggctgataaaggagagggagaagaaaatagaccaccacggaggactcttggtgactatgcgtatcaacaaagaccaaaacattacaacagcatagtcattcctcatttcagtaagaaggttgtggaattgaagcctgcattactcagtcttattggatcacatccatttgctggactagatcatgaagatccatacactcatttgtctaccttcatggagctgtgcagtaccatgggagcctctgatgtagatgctgaagctgtctatctcagagcttttcctttctccttgactggtaaggcaaagacttggcttcaatcccaaccaaacaaaagtctcaacacttgggaagaagtggaggagaaattcattgtcagattctttcctccatcaagattcataagtgcaaaatcagcaattgctactttttcccaaggatttaataaatctctctgtgaaacatgggagagattcaaatcactactgcggaggtgcccaaatcacaattttgatgatgctgcgcaattacatattttctacagtggtttgagacctcaaacaaagatgattcttgatgcctcagctggaggtacgatgatgtcaaagagcccggaggaagcaattgtaatcattgacttcatagccgccagtgattaccaatctcatcatgatagatctccgattcaaagaaaaggtataattgagctggatactcagaatgcaattctagctcaaaataaactcttgactcaacaattagaggccttaacaaaacagataggccaacttcctcaacaaattcaacaagcaccttatggttgccaacaacaagaggaggcttattatatgcaaaatcagactagacctcaacagaacttccaaggaaattaccaaggctatagagatggcccaagttcttatggctggaggcaacagaatgataatgcatattatggtccaactaactcttcttttatagatccctctaacaactcctatgcaggtttttcaaatagagttccaccataacaacaagaagaagctcagcctgatagaatatcaaaaatggaagatactctaactcagtttatgcagatgtccatttcaaatcaaaagaacactgaggcttccatcaaaaatcttgaagtacaggttgaacaacttgcaaaacaaatatttgagcatagcagtggacctttttcagcaaatccaaaagaaccaagggagtgttttagagtggatgtcttgaatggaggaatttctgactccaagaagttggttcaaggaaaagatcattcagagaaaacattaacagaagcattagaggagatgagtgaatctgaagaagaagatagtttagatcatctccaacaaccaaatgttttcaaagaaattccttaccagcaatcattttatgaggaattgttagaggaagaaaagaatcaagaatcaccaataaaggtaaacgcagtacctccacatgctaaaaatgtttttcttgcagagacttcaaagaaaccagtcataagccattcaagtctctcggaaaaagaaaagaaactggtgaaaaagttggaggaaaatgcaaaagccattggctcatcccaattgtccaattgctggaagccaaagccataacaaaggcgtccagctaatacgacgttaaagaagcgctcctgggaggcaacccagtgtttttgttaatttttgttattttaatgttatatgtcttttttttctatttaaaaaaaatatatatatatatatatatatatatcttatctttttgaaaatatcatctgttttgttagaacttggatacaggtccattttgttaggaaaaggcaaagcaggtgatgaagaagaacgtggcagatcctattgattatctgaatggaggacattgagctcctcagccatgatcttcaaaaatcagtgacattgtttttaaatttctttactactttgtagtttaaattcagtactttgtttatttagttactatgtttgcttaaatagttgtgtgcagttataattctttttggtattgcatacagaggtgttttgttaatatagttgtataaatctttttggggcttaactgacatacatgttttgaaaagaatcaacaaatataaatgttttgaaacttgttttttggatcagaacaccacaaaatgattttggaaactttgagaatgaaaaacaaatgaatgagttttcacatatcaaaaatgcaagatatttttacatggaattgataaataacatctttcgaaacattgatttgatttgaacatgataacagaccttaagcctagtgagtgtgtgcaaccacataaattacattgagtatccacacttatatgatttataattgattttacatgaatttttaattgtcaaaacatatgatgcatggatatgatttaggccttctttctttttaaacaactttttaagccactggccaaaaagctatcccaaacgtacatataatgattttacatttgcaaacccttttgagccaaacacttgatattttattggaaccctatcctaggataagaattccttacctcaccttaggataggagagcaaaaagggaaatattttgttgatgaaaactttttgggtagctcatgcaatgaaatagacttttaaatgtggccatatgctattcatgtgataagcaaaagaaaagaaagaaaagaaaaaaagaaaaaggaaacaaattccttgtgttttaaagtattgtacaaagtatttgggtgaaatggaaaattgataaacatggatatcttggaagaaaaaggaagaaataggaagtgataatcaaattgttttatctttacttgctctcctattctcgaggtctttttgaatatccagaaaaatcaagatttctttcaaagccagacccaaccctaaaagtcctagtgatccatgataaatatgtattttgatttgatgggaaatgaactgcaaaaattgatctataacatgtcagtgttggaattgagactaaacactcacctgtgagaattaaacaccttcgaggttttcctctgtttaaatcaagcatatgtttcctctgattttctttagaaataaaatgtgaattgatcttgatctcatttggttttgaaaatttcatcttttgtttcaaattcttaaggttgactaatttgaaacatgttctaatcactctgaaaagttgattctttacaaagcatgttcatcctctatgttcctattaattatagtgttagttactttgcttgaggacaagcaagattctaggttagggggagtgataagtgccctaattcaattaaattcaggtttcaaatataggcacttatcttttgatttcgaaaactttgcttataaacttgccctaaacctagttaaattatatttattacttgtatgaatgtagtttttatattttggaagattaatccaatcatgttttgtattttgatagattccgtggattttcgaggcttccgaataatcatagcaaacctgggaggtgcagaaagcaaatcaggcccaaaaatgactcataacagcaaaactgggggtgcagaaagcaaatcagacaaaaagagacttctggaggtactttaactcgcccaggcgagtgaatatagtgtattttggtcgcctaggcgagcagaaactgcaaatgggcctccaattggccaagtggacgtgcaagttgggctgcaagttggttttaactcgcccaagcgaccaaacaaaggcaaaaatggtcgcttgggcgaccaaactcgaccaggacacccccctataaatacccaagcaccctcaaagctcaaaacacttcttgcattccattctctccttcctccttgctctcaagcttgttctttagtttagacttttaaatattagtattaggtaggttaggaaagtgagagaagtgagatttagtgtggaaactctgccggaaagaagcggtgatggggtccttcatcaattcttctcttaaggaggttctctccatgcttggttagtttctcttaaggattggatgtaatcttctacttttaagtatctcttttaatatttatttttgcataagtcttttctatttattattggtaaatttattccgtacttaacgtttgattctacttgatcactagtatcacaaacttaaattctaagtgagactggagatttgaactgaattaatttactctttacgttacgttgctaggaatagagcataacgtttagattgcaaataagcacgcgattatgattgtaacgctgggatatttatttcatatgcgaggtatcgatatttggtaaatatccttagaactcgattgcgaggaatcgattcaaggttaattaatgtgtgcatcaataataatagaaaatgatttatacatgataatattaattggataccgaagtacgaatgatgaaatccaatcctacgcttttcttgaattaatcattttattagtttccgtacttttttagttatcttttatttccataaaaatcatcaaaacttcgaccatactcgttgtacataactatttaactggattaattgagtagcacaagtccctgtggagacgaacttttataaattttgtaacttacaacgacaattggtacgcttgccaaaagtctaacagatattcaatgcaacctttcctaagtgttccatgaaggtccgtaatgactccttcttttcctttcctatgttgacgagggccacggatgttagatggtgtagccgacttgtggcaaactgtgtccgaaagtcggttgtcagggtgtcgaacgagtccacagaatttggggcagtcatgtaaactagtgaaaggcctgccccttcattaatatcaggaatacttgacaaagtattgcgtcattggtggtatataggctcacctgggtaatgtacaggtccaggtgctcgtccggatctgtggtgtcatcatacttatcaattttcaagttcttccaattggaaggaagagtcacctccatgatgctagagacgaagggattcttgaactgtgtgtgatagttgtcttcctagggtattgaaggtcaggggagcatcatctgagcaaacactcagattaatggctttgggcaggccaattgtggttgatttggcctctcctccttcaggcagattagcctcaggttgccgcaacttgtgcacctcccggaggtgagcgttctcacgccgaagggggacgatttcctcagcatgatgtttatgcatctcgaagacctaagcatgtagtctcctcactactgaagacaagtcaatatgatcttctacccgagcgtcttcgttgtggtgattgttagtcggttgctccattgttgttgtgttcgttctagctctggttatagccataaattcttggggttagggtatatgttactcggccccacggtgggcaccaaaattttcctatcacaaatggaacgggtgttcgtccttctctcaaaaggtctcttactgtgccgaaggatcttctgtttgatgttcctttttgaagtcttaggagtgtgagtattcaacaaagcgtaggggggtaccgcaaaaggcactctgatgctcaagtgagggttcgacttagagctattaatgatatatagtgagtatgtgagaatgaatcaatcctcttacatgggagttcgcccttttttatactaactttgctaggcctgaggtttgtgagtctgtcacatcatgattaccagttgagtaatagtcctcctgatcatgtttaggcacgtctaatcaagtgatcacttaagcggacttagtggtaataatcatggccgactggtgctagttgctcacacatattgaaggtcgagatgtatggatatgtggccgaagggtgtgttcagtttgagtgtgtcaggtgtcccttccgtcttatcggatactttatccaatatacttgtattttaattcctagaatatatttttatttatgcttaattttattttttttattggatattatactatgcatataaatttaattatatagatgacacaaagaatcgaagtatcgagaaatatcaataaaaggcagcaagaccaacaactttaggctgtgatcaatttaaaaaacgttttttaatgtttgtaaataaatagttataaaaatactatattattttttactttctattaatagaatcaataatgtgagcacatgaatcaattcgacagcatcctctgaatatgattaaacctccactgcatgaaagccaccttttgctaatctattgtttattgttagaacaaaatcaatttaatttaaaatcattttatttaacattcatctaaacacatacttaatgatttatagaaaaccaaatccattgacactcaaataaacaatgatatgtttttccttatatttaagattgattatatatttatattaattgtttgtcaagtgttcaaaaatccttaagtagaaatatttcttttaccaatattttatagaatcaatcgtatatactgttttattaatgataaaacttaagtgcgatattatatatagtttgttctccaactaaaatagaaattgtatttcaatgacttgtacattaaagatttacgcatgctattaaagtaaacaccaattctaatcggaaaaccacagtacatatactcaaaaaatttccatgcaacttgagcaaggaaattttgagtagcaactttgaatttctttattgcctcgacaagaggtttataaaatgacacacattcatatcaaaccaagcgcagcaagaacaactctctttctgaattctaactaaaattaattctttttgctcctcataaacttcctttttgttttatcctatcgatggtcacactaatccttcatagaatcgttggtatattttgatgtgaaacaagaatttttcaagttttgagtttgaacctaaatgagaattcttcttttcctaggaaactagaataatactcgtgctttgcacgatggacaattcaattttaataaaaatttagccaagacatcggcaacttgattgacttcacgataaatgtgccttcaagaaaaagtttcattcctctgaacaatttctctaatagagtgaaccatctgttagtggacaagggaattagtacaaccttcctcagtcaactttttttttattgataaatattaattgttaattattagtttgttagtaagaaaatcgaatccacaaattttctttccttctcttctccttttaccaccaaatcaacgtataactcctccctcaatcaacttgatggttgttttagagtcagattcattcaaccatcaaatcattagagtctctaaaccaacacacacaccccaccctgaaaaattgaacattttgagcatcaagacatctacgggtaatccgataatagcccaaacattatgatttgcataggtaagggtctttcttcatatctatgctatcttgtttgaatggtgccatggtgagttttctttcaatctccttcctaaaaaagtaccatcttgagatatctttgagaaataccttgacaagttccatgatgagagacatcaccaaccaacaatccagcatccaccatgtgaagaagctcataagttttgatgtatacctgtattaacatttcagaacgtaatgtaatgatcacgccactaatatcaagtgttccctgtagtaaaagggcaattcaagtgcccaaggagaaattgacgataacacgccaaatttcgtgtgtttctactttcttggtcgttgcttctaccaagtaaagtatgaaatgtagcttctacttgactcttgatggttctagttatttttgtatatctttcaatcaatgtatttttatttttattttgacaattttcttaaatgatatgcacttgtattgttcattccaaactagaagccttagtaaagcacttttttatccattctattatatataatttccattttctctcgaaaagtttatggtttgaaccatgttttccaacaccttctctagagtatatgatatttctactcatctagaaagtgatccacttcttttcaactatatcatgatttaactatggcctcaattacctttaattctactgctgtcttctttaattttttcatgctctgcttatctttttatgcacttattttttgtgttaatactgatggatttagaccggcgaatttcaattattgttggcgaaaaatgaatggttttgtaaaaacaaatggtgaactcattgttttgaaattgtggttggatgatccagcacatatttcaagtaattttgcaaattttcacaaaaatttgtaaaaaaataaatatgcaatactaacaagtcaaactccggcattaattacaaaacctaatcactacctgacctatctccaaccctttgaccctttctactttaaatatcaaattgaaatgcaacccacactcaacttttgtttttatcccctaacagcttgtaagttttcaagtcaacaataattaaattaccatacaaaacctgtgacattagcacaggaagaatattgcgaacattaacaaaatattgaactactaaagtaacgtcttaaattcaccaaaataacctcttaacattaaagcatcaaatttatatgataaaaagcactggagagtaaattaagatgttatacttaaaatcatcaatttaaatgctagcacactttctgccatcactaaatatgcttgtttcatttccaaactaatgggacctcatgaatttcagccaataatattatgttttaaaagtgtgttaaagtgtgtgttgtcagcactcctctacaacatgttacaatgatcgtaaagaaaaatgatcagacacagcatattttctcttagatgcagacaaaatgcaggtttagcaaatcaaagagtagcataacaagaaggaaagattattaattctttcaccatcaaaatgactcaagaatacaaaactaaatatcattccagaactttaaagttgcacattactaatattcttaataaagacctgacaaaattgtatgataattttaaaataagctttgaaaacaaatgaaaagtgtaaactgctttcaactctcagtctgctctctcagcctccgaatggtgctccggacagtgacagcactggcagtactgtcaagaagaaaatgcacaaacaaatcatatcttcaaccacaataaaaaagaaaacaattaactgtaaaatacagagtgaaggaagattcttacttcaatgtgtaagcacctccagccttcacttttccacaatctttgcagccccaaatacccacagccttcctcttaacagcgtactgcgcaaacaaacatatcattaatagttgatcttaggccacagcaaataacagagatttttatgacccatgatatatcccaccctctcagaccaaagtcaatttcaacaagtttaagtcttaaaattaaaccctatatgtttttatgatgagttcataacctcaaataataatttcaggttatcagaatcaagtctaatgccttatattcttttaaaaactataagtttgttaaacaattatgtattaatagacaaacgtattggctgaaagaatacaactttgtacaacatgatattttacatattgatattgaaatattttgtaacatattcctttatttataattctatacatattaagattgatataactggtgtgtaactcgatcttatctcatagactcgtattattgggtgtgattgagattgagatcagattcatgaataactctatcaacaatttttggactgataaacacatactcatcccacaaacactcctatagccaatagtgaaccccaaaaacattagaaagaaaagaaaaaaagaatatacctttccacagaactcacagaagaatttactgtgctgactaacttccatcttcttgatttgcttccttaaactagcaccatatcgggtgcctgtaatttgacacagcataaacatcagtcatcacctcgtttttttagacacaataaaaaataaagtaaatttgtctctaacaggtaaaggggcatcaacatcaacaacaacaacaacaacccttgatttaatttgacatagaccatagtctagcattcaaaattcactttagaataaacaccgaaacaaaaaataaaatacccaaaagattcaacaaagaatgcaaccaactacgtaccgtattttccaacaataccggccttcttggttctcttggtctggtcacatgcaccaaaaagaaaaaaaagaaaaaaaaaaaagaaacataaatcatgttaaaatctctaattagaagaaaccttaaaattccagaaatacataagaaatagacagagaaagagacagcaccatttttgagtggtaagagaagagatatcgctgctacaagttagaggcgcggctgctgaagtagaaccatgaacgagggtttgttgcctgagtgagaataataacaacgcttttgagggtaggtagaatcatgggcctattgcgacccatgtgtaagcccatactaatgaattatttaatacacccattatttgcttggtgcacctccaaactttccaatatcccatttttacccttcttcttcctctctcccacctccctgaaccaccacatctgcgcgacctccaccactcaccccctctttcctccacgctgccagccttccacctcgtcaccacccagatccacacacgcaaaatgaagttgaataaggtgatacattatggattgtgtaatacgtagtgtatatgttgttacagattgatcaatccataatgtagataagaattttaaattcatatgacaaagtctgcagggtgcgatgtgtgaaatagacaaaaggaagaatggggtgtggtagtgttagatcaatgataaataggggcacgacgacactgggaggatgggagagtatgaaagaagcaaaaatagaatagggaagaaggcaacagcgctagaacaaggaaagttaaaggtgctgaggttcagggtaaaagagtccattcagtgctttattatttctaatgagatgtaccaatcaaatatggggtacattaagtaatatcccacataccagtctaaacagatccggacaattaccatattgatatttaccttaaaaaaaacacgtaatggattcagaggaaaaatgaaaaggaatttagttagaagcaaaagtgaatgacagattcgaacgagacatgctttgttttgttataccttcttggttttttagtgtatttagatgagtgttaataaaattgatttaaaaataataattttggttggttaaaattaatttttaaataatttgatttatgtataaatgttatttattataaaattaagttagaaatacaagtataaaattctggtcttgtgtgtgtgagtcatcttaacttgtatgtccaaataagatgggatatcaatagcctcaccggcgtatctatattgcatctagagtgggcagatacacccctcatttcaataaaattactagtatttgtcttaaaatattatattttgcactccataattttatattttgtaccatctaattttatgtatttgaatttccttaccagttcacatgtaagagtgggtaaatacaccatcttattttaataaaatgcaaaaaatattatattttgcatcccataattttatattttgaacccttaattttatgtatttgaacttccttacccgtttacatgtaagagtaaataaatatacctcttattttaatgaaatgcaaatattttaattgaattcgtgtttgttacggatgaaagtaagtttgttatcctcttgtttgaaatagtcaaacacccgctactggcccacgataaccacccaggaaggtgggatatggccgttatcccccacgagccaatatctccgcatatataggaacgatacgttggcttcaaccgcttgattaacaaaatccaggtatcctataaatacataacaattcatggtgaaaggtacacattactctgaactctctcttttcccttcacactagcacacactgcaccccccattgtgccgtgttactccgtgtgattttcttcctcgagttgcttcatctgcataagcttcttgagagagagagagttgatcctacataaaatcatccaacatcattgttggacatttctgttctctttgagcagaacagtgtttgaatccaattatcccatataataatgataattatcaatttttattttttaaataaattacctccactgatctagggtctgtcactgaatagccctgtgttgttacatagaattctagtcatctttgagaaattaattcatattttaacggttgagtacgtcttcagcataattacgcataattacttggagtaaattaagttgtgcattaagtgagactttatgttcgatctttcttaatttacttcatatatgctttggttggtgattggttgaattttgaacgagaattcaatatatttgggctgttcatttctttgaatttttttaaatatttaatttacacaaatttttttcatagtaaaattttaaatctaacacatcgcaaagacttatgtatagtatcttaagtcttgagcaatgcaaaatcattttttatcataataaatcttctctttttcaaaaacaaattactgataaatttagaatatttaacaaatttaatagcataaaacaacagagctgtcaagttgcagaattttttcataattattcaggttaggtgtttctttgattgtccaaagcccacaatgtctcattagtcacgttagaattttgtcttgatgatattttgccttgtgtaactacgtaaaaaaaaagtatgtttaacatcctgtgtgcaaattaaaagttccataatagtaattttacatcataagcatagtcttagtcacgagttagtgaaaatagtttcttggttgatagttatattgagtcttgtttaatgaggttaattgtaattaatgtgtatgaagtttcttatctggtaaaatacagggtgtggagttggataatggttaatgactaatgtaaagggaatattcaatgtcaagtagggtgaggtatctagcacgtacgttaaataagggtatatatattgctttgctctctcaaaaatttgtcctcttttataaaagcgtatatatcccaaaaaactgtcaaaccctaagttggcaagcgcatgaatgagtttccacaatggtcgtggtcttccatttggactgctgggagttgttgtgtgccatttaattgcctttgcccgccaattcaaaattaattaatttgttagtaacaaaacaaacttctaaagaagaaaaggagatgattggtagtaatatgtgggagtgagggtgggcaaatgcactttttcattttaataaaattaatagtatttattctaaaatattatattttgcactccataattttatgtatttgaaacttcttatccgttcacatttgataataagtaaatgcatcctcttattttaataaaatgtaaatatttatcttaaaactttatattttgtactttttatcttcgtgtttaaacccaactatctcatatgataatgataattataatttttttttcaaataaattgtccctactgacctaggatctttaatccaccactgtcataagaaaaatcattgcagtatgtaacacaacaaatcctaaaactagaaatgaaaagaaaatgtgacatgtaataataaaatgtgcatatatatatatatatatataagagagagagagagagagagagagagtggggaaaaggtgagactcgtcacccctcactcaaagaaaatggtgaaatatgttaaaatttgtgtatttcttattcttattttaattattttcctaattgtatacatgcacatggtacgcgtgtgattagggttggcaaaacgggcttggcccgccgggccaacccgtttagcccgcaaaaaaatgcgggctaggttgatatcagtaacccatatatgaaaaacggggcgcgcaaaaaagcgggccacaagcgggccggggcggaccagcccgcgggctgtcattaaaataataaaattaaatatatagaagatatttatgtaaagtaactttttttgagtggctgagagttaaaattgaaaaagaaaagcttgaccgcttgagacatcacactcaattgactcaaatcaaaaagggaaagtgaacttctccttcacggcttcacccctgaccccgtgcggccgtgcttccacttccagcttccgtgaccggtgaccgtgactgagctttctgtgcgggtgtggcttccgtgcaagactgcaagtgttgcttccttgcttccgtgccgtcactgtcgtgcttccgtgccgtcactgtcgtgcttccgtgactatacgggtttgaccgaccaccaccaccagccaaaggtgcgacctcgagctgctgcttccttgcttcgccgttgcttcgacagttcgacccagcaaggtaactaatttctattttactgtcgtgcttccgcttgttctgttaccataaattgaaaagtgtttataattaatgacagtattagatcactagctagcatcaaagatgaaaattaaagatcacagtacaaacacatatcacaaaacctgcaaccttggcattgtgaaatacacttccccccctgattctcgattgaatttgtgaaactcgtataagttgcctttaagtagttcacatacgtactattaacaaatattcctagttaacatatatttctcagcatcactttgactatatatagtttgaaaggataggataacccctcatataatgtttcaaaataaaatgacagtgcaaatagttatactttacaacatatcctagaaagcattgaaacctgacagggctacaaacattaagttcagagtttaattagttaaaaataacacaaatcaacaaatgtggtatcattgtatagcacataaaattatggagaaagtgatattagcatccaaaataaactatatctaataatgtattgacgtagactcttgatagcagtggggaaagtgatattagcatccaaaataaggatttgtttatatgatccatgtaaaaatggagttaaacaaccccttttaaattatataattaatagagttattatcatatttaatgcataatcttttctcactcatgtcatttatgtatatagttaaaatttcatatgtaatacataaatgtgtctcatatatatatatatatatatatatattttctttatgacaaacccttgatattttttattttattcattctacaacttataagcataaatcttttttttttttaattttgcttttggccttgtgatttctgccttaatgactttggatttgtcaagtttaagtgtttaacatatattgaattgtagattctagcgtgtcccagtaaaaattttgaagaacccaaattgcatatacatactaattattaaattacgtcattattattaaatctctcatttcacatattttgttgttttacatgtaatttctgcagtgctttgctttctttgagtgattaaatagatgtgtcaagttttaatatggagtctgaaactgtgaatgagcatgaacatgttgaaaatcctgaagtacctattgaattatctgaagctaatgaaccaaccaagaagaaacggaaagccacaacttcagattgttggaattttttcactaagataggagtgggtgatgatgggaaagaaagagcagagtgtaaggcctataaaacaaagtataaaattaggggtcatgcatatgggacatctcacttaattcgtcatatttcaaagtgtaagggaactaaatttgaagatgttgatcaaatgatggtagacttacaaggaaaattgaagtctccaaagttagatcaaatggtgtcacgtgagatgtgtgctgctgcaatcattgagcatgatttgccatttaactttgttgagtataaaaaaattagaagttggattaagtatttgaatcctgatgcacactttatttctaggaatactgtaaaatctgatgtcctaaccatttacaagaaagagaaagagaagctaaaaaagatgatggctagtatcccaaatagaatatgtttaacttctgacttatggacctcttgtacttctgagggttacatatgtttaactgctcattttgttgatgttgattggaagttaaatagtaaaattcttaatttttgtcatatgtctcctcctcacactggatttgacttggcttcaaaggtttttcaatttctgaaagattggaaaatagagcaaaaggttttttctctcactttagataatgcatccgccaatgataacatgcaagacattttgaaaattgatcttggaacaagtggttggttgttatgtgatggagagttttttcatattcgttgttttgcacatattttgaatcttattattcaacaaggattaaaagtggctagtgatgccttacataaaattagagagagtgtgaaatatgtgaagggatcggagggtaggatgagaaagtttaaagaatgtattcaacagctgggccttgagtctgatggtagtgggaagcaattgtgtctagatgtttccactagatggaattccacttatatgatgctttgtagtgctctcaaatatcaacgggcatttggaaattttcaatcaaaggatcctaattacaagtggtgtccttcagtagatgagtggaaaagaggagaaaaaatttgtaagttcttgttaccattttttgatactacaaatttgatttctggcacttcctatcctacttccaacctatatttcttgcaagtttggaaaattcagcgtgttattattgagagtttacaaagtgaagatgaggttataaggagtatgggggaattgatgatggagaattttatgaaatactgggatgaatatagcaccattcttgcatttggagcagttcttgacccacgtattaagtttacttcattgagttattgttactcaaccattgatgaatctacttgtgaggaaatgattcaacatgtgcggacaaagttatacatgctctttgagaggtattcaaccccaagaaacattaataatgctgcctctactcagaatcttgaccaaagaccccagactatttcttcaaccatgtcaaaggaactcaagggaataaatcaaagaatgtttggtgtaagtacatgcttattaactactaaaattatgttattatgtaagtatttacggttttgtgttgtgtacttgattgattttttttttttgtttaacttgtcaaatgtaataggaattaaaaatgcatattagtcaacttgcctctaaagttggaaagtcacaacttgatgtttatttggatgagccaaacttggattttgtgtactatgaagagttggatgttttgcaatggtggagggataatcataaccgctttccagaattatccataatggctcgtgatgtgttgagcattcctattactacagtggcttctgaatctgcttttagcattggatcacatgtcattaacaagtatagaaatcgtctcttgtcagaaaatgtccaagccttaatttgtactcgtagttggctgcatggttttagtgagactggtaatttctttaatttcattattttacaatttaaattgccaattaattttcttttaaatcatcattatatattgcctaattttatttttggattataatttgtagctgaagatggtgaggaagactcttgtgctttaaatatggatccaactgtttccaagggatcaaatacaataagtattgaagatgcttagatagatgcaactacttcttgaattttatcattttgcattttggaagttgtaatgtttctaacttgttattagcaaattttaaatttgatgtatgaatgttgttttgctaactttaatttaacgtattaatatagtattagtaacatttcatttgccatgttttttctattatttttgataatttaatatatgttttggagttctatattttcctacttgcattgaagcatatggagacaaggtttagtgcaaaaggatgctttgggtactggtgttttgccatttgctgggtcaaacttggtcttgagtccttcccaatggagtagtcatctagtgggtatgacttatctttatcttaaaatcatttgatactgaattttatattctttattgatagtcttgttggattcacaactttgtgcaacttctcatatagcttattgccttttattcaagaaattgcttgggcttctcatctctctttataggtttgctttggtattatcaaattgaagaaaattaaaagttcaaattttattgctttgattggtctttgttccttaagtcagtagttttactcatgttaattggttgagtttcaaactttgcttattttttttaattacaaaattgcttaatgtttattttcctttgtaaatattaacattgtttttgtgcttttagaaatttgattgattatctattatattattataattcctctagctaggttgcattgatatggttatggtatttgcactatactagtatgagtatggataggagagctaaattaaattagtattttttttaagcgggctagcccgctggcccgctttaatgcggggcgggctagcatttccagcccactttacaaaagtaggtcagcccgccccgcttttttggtgggctgggccagcccgccccgctttttggtgggctggcccactttgccaaccctacatgggcaaaaaaattaatatattgtaatttaattaaaaaaaattacagatacatagcaacttcaaatctatttacacatctatggcagttgaacacgtgaacggtggatgtgtttaatcacgtcatggcagagcgcgaccagtgcttttatcacgtgcatggaggacgtgtttaatcacgtcgcaacaggacgggaccagtgcttaatcacgtgaatggaagacgtgtttattcacgtcgaggacagacgcaatcagagctgattcaacaggacgggaccagtgcttaatcacgtgaacggaagacgtgtttattcacgtcgaggacagacgcaatcagagcttattcacgtcgtgcaggggcataatccaggcgtcattcacgtcctatatggacgtgaccaagcttcattcacgtcgcacagggacgtgatccagcaactgtattaattcgaatcccaggcttctcccacactgcacttgctactctctctatatttttttcttctgcattctctctagaaaagggcaatttgaagcttggttcaaggtgcaaagaagctatataaatcaagtaagtcatgttgaaatgttttttattttatttggattacaatgttattagttagtgacttaaattgttagtgtcttagattattaattaattagtgtcttagattatgaaatatgtttagggtttagggtacaagtagtgggtgaggttagttagtttttgaaattgcatgatatatattatattagtaggttagttagttaattagtttagggtacgtaggttatgacatatatttagggtttaagaaagaaatagttggtttgctaggtttagggttgatgacataggttttgggtttagacctaggtcaagtaagtcatgttgattttttttttattttatttgagttacaatgttattagttagtgacttaaattgttagtgactatttagttatttgttatattaataatgatataattttttttgtttggattaaaaaaattataaataaaaatttaattttttttcttttagttttctttcaattaaaattttaataatttttcttgttgccatgcattccaaacatagtgtaaatatttataaaatatttgtgaacttccctatcactccaccaccagttattttattttatgttttgatttttaaaaactttttataatttttaacttgtttttattaatttttgtaatttcatttaatagtagaatatattgaaaaaataatttattaccaaatatcttaatagtattaaataaaatcatttaaaaatatatgtatatagtttacaacgtactacatttttgtaattttttatttaaattgtaattaattaatttttttgcctgattagttagttacttagataatcattaagtaaacactgaagctataatttttaatttatcgttggtgacttagattattagatagtgacctagattacgaagtagattattatatagtgacctagatacataatggatttgtaaaaataatttgttagttagtgacttaaataatttgtatttgaaattaggtaaaaaattataatataattataaaatgtgtagcatattattatggctgagtcttcatcatctgagtcacctcgttctgcctctgaccgtgagcatgagcatatcgatcccacgacgcatgttcatccctgaccatatagatgggatgtacttcgaaggcgcaggcaacgcactcatatttcacaggcagtgtggaatgaggagacatagagagagctgaagatacgtcgcggaggtagactcattggtggaccccgacccgacgatatcccggacatagtagcccagtatttgactgaggctggtttcatccatgtggctcgcatgaagtttatgcaggtatcgattaacgaatgttgttaacttaatctgttgaatttgtaattttgaaatcaatggtttcaaacataatgtatttgaaacgcataagtcgataagttacttcgattttgcagattgatgctgctcttatcagtgctctggttgagcgttggaggccagagacacacacgttccacatgccccagggtgagatgacgattaccttgcaagatgttgcaggtattctagggttgcctactgatgggcaagccgttaccggacagacctacacagattggtcccaactgtgtaacgaggtttttggtaacggccctgatccggacgccgagttatgcaccggcagtttgaggttatcatatttcaacagagtgtatcctgcatggcaatttgttgccgggaaccctcagaatgtgatatacttcacgaaggctcacattgctcgaatgttaggagcctggatcctatgcgacagatcaagggggagcgtggtaggatgtcggtatatagccttacttgctggtgactttgccgacattggttcatatagttgggggtctgcggttctggcaaacttgtttagacagttgtgcgaatacacagaccccgatagaaaagacatcggtgggtgtactattctgcttcagatttgggcatggctcagatttccaccgattgctcccccattgcctgctgcgtccgagccagaccgccacttcggacacaggtatgtttactgtgtattactagaatgactgtgtatttatgcgtgctacaattaacgattgaatgtttaatctatgtattagatttaatgccttacatcgcttcagcccgaactcattgacatttttccgggagaggctagacaacctaactagacatgaggtatgtgtttataaataaataatgttcagttttaaatggatgtgaatatgcaactgactcgtacatatgatttatgtaggtggtttggcaaccttacggtgattacgattttatgggtgcatctgctgagacacaacgtctgtggatggctaggacacctataatttgttttcacattgctgagtattcacagcctgatcaatgcatgaggcaattcggacgggatcaaccaattcctcacagggctggaaaacttaagggtgttcatgattatacccttcggggtaaagcccaagaaaattgggctcgtaagctaagaaaattcatacatagatgggataggagaggtgaacacgttgacgtgcctcctgcaatacttggtctgatgtcaccgaaccatgagtacatggtgtggtatagactttacgggaagcgatatgtgacaaagcggggggccagattaggacgctctgtaagttactacaccacaatatttattatttcattatttgatatagttgtttatgtaactatgttgtggcttataggttgatggtctggagaatttgtattttgtgacgacgcctgaccaatttggaaactacggtttggactatgtgcatgacgaaataggtcgtctgatcaatattttcagagagtcagctcgggtgtctgaggcaggtctagaggcaccgcagtcccaacttccggatgagtcccagttatcgctcgacgttgggcttcgtgcgaaagagggtcgagggttaggacgccatcgacgtcctattacacctgttcccgagcctattcatgcacccacgccatgcaccagtggatggatcaggccaccgtacattggtcatgagtacggtgttcaccagacatattacgaccctacccaggcagagggtcatacattttatcggccggagcccccaccgatggccacagaaagccagcctacgtaccaagtgagtccagtgtcagtggcattcggggatcaggcagggacgagtgcggcattcgggatggccacagaaagccagcctacgtaccaagtgagtccaatgtctgtggcattcggggatcaggcagggacgagtgaggcatttggggatcaggcagggacgagtgcttcggggtctcatgactggggtggtacagatatggacgacctgtatggtcaacttaatgttgccgcaggccatacatattatcctccagatatgccggtcgaggacactccacctccatatcatgttgctgatcagtattcgcgtggacgtggtagacgcagattgccagatcgtcaggcgcgtcattatcagtggcctcctccttcgtaggccttatattttgttatttaatttagtttccatttgttgtatttgactatgtaattgttaaacatgttttgattatggacaattttttaccgcctatatttgtcatggacgtcgttaggttatgaaagttctgcgagttatgctatcatgcatcccaaacggccgttgcgaaagaaacaacttcattgtttaatctctcaaatctcaattaattcatgtgggtcccataaacatgaagcctttctaaccatgaaaattaaaacttttagtcgctatatgttttgttcttcttctaattaattcatgtgggtcctgtattatctcattcttctattgtttaaccctaaaccaagatgaaacaactgacaactaaaaaaatagtaatttaaacatgatgaaaccttaataaaataaaacaaaatgaaagaaatcaatttctatagttgatgacatagctggcaacaagatgagaatcatatgtattgaggcgtaatgattacgtaacagggcaacatttaatgcatggatatgatctgtaacactggtgacgattgacaacactttgctggctaataacaattctcactccacgcagcaacaacgatagcagctgagttattgacaacactggtgacgattgacaacactttgtggtcctttttactgtagacaataaatgcgtctgatctgtaaaatgacattgacaacactggtgacattgacaaccctaccacgacaggacttaactcacggcccatccagacgtaactggtcacgccccacacaggcggggcttaacaccattatatataccccactgaggagtataatcatcccacacaacaaacctccacagacgaaactcaacctcaataccatggccttcttaggtgaaacctgctctcaaaacattggtaattccaaattagcatttatttttccgaatggatcaatcatacacaatgaaactggtgttgctttcgtatatcatactccaataccaatgcgagttcccgatgaatgttcgtttcagtcactcaagagtagaatgcacaacacctttcagctcacaaatgaaaacctaggtcaccaactatttgtaccctaaaccctaaacctagttcataacctacataaccaaggtaataattattgtaactcaatgaacctacgtcttaacctacataattatttgattttttggccgtgcttaaatataggtctacataactaactactcaaaacctaagtcataaaacctaggtcaccaactatgtcacctaaacctaggtcatacagtacgtaactaactaaacaaaatctagctcataatctacgtaagtaactaataatattctaacaaaataaatcatgtttgagcatagcatcacttacttgactcagagctttacaattatctaatttttttcccgtcataacataggaaattaactattaatactctaagccaaataaacctacaacaactaacaacttacaatttttaatatcagtcactaacaaagtacaacaatataatatttcatgtaattttaaaaatcatatatatttgaacaaagccttgataaccactcgaatcaacacctaggtcataaaacttacgttataataagtaactatttctaacctaagtcaataacaattttctacatcaatatcaaatctttaagacaacaacacaatatatttatgttatttacaaataatacgtttaatcaaaacatggtgccaacacaatatatttcatacttagaaatgaatccaaagaaaactcacacaagaaaagccttcaaatggtgccaacacctttgcaaatgctgaaaatggctgaaaatgatggttgcaaacgctgaatggaggtatatatagagtggcaaagtcacgtcctgcagcgacgcatctggtgcttgatcacgtcctcacaagacgtgtttagtggctcgatcacgtcgtgcatgggcgtgtttaaacacgtcctgggtcgacgtgtttaaacacgttttacagggacgcgtttggctgcaatagatgtgtaaatacatttcatgctgctatatatctgtaattttttaattaaattacaatatattaatttttttgccccctacgtgtgataatatttcttttactttatatctctttgaatttaaatgtactatttcttacaagaactaactaattaacactaggtaattatggtggttagtatatccttcactttatatttctgaatttttccaaatacatttattatttttttaatatcacaataaaatttataatcttttattatttctataataattaaaattgatttactatacatttatcattattaagtttaaatataaataatatttcaaagtaatagaaaatacctctcccattcaaaaattaatggtgcatcaaattagataaattttaacacaaataaatgtaataattaatataaattaatgtcactgaggataaaaaactagaatgcaaaaatttatccaattatattttgttattggacaaattttagcatgctaggtttgatcaataaaagattctcaattacttctaccttaaaaatggaaaaaaaatgagaggtcaaaatatttaccaatccaattaaggttatatacaccaacaggagctaaaaagttagtgagtaacgaaaagttattaaattaacttattaaattacaaatgtttggtaaaattagactaaaatatatttttcattctcataaatttaaaatatttggatttcatccttgcaaaagttttaatgcttttttcgtcctcaaaaaattaaaatatactacttttgtgcctcaagctaagcttggctgattctcatacctatatttcactccttcattggcccattctcggctactctcttcttatgatttcaggagtttaataaccccaacaaatttcaaaagaaagaatgccacaaaaccgaaacacacaaaaagagaaccaaacaaaacaacaaaaaggaaaaagaagaatacaaagagagagaaacaaagaaatagtgctcatttacattgaccgatcaaagggatacaatgacgcaccatttcctcacaagaaaatattgcagacattggcacccctggataaatcttcaagatgtttctaattgtatagatgaaaaagcctttgctagcaaactcatatctggatcgcatcataggagtgtgcgtttgtgaacgatagtcgtcgtcgtcacattaatagtacaagggaactttgtcgtcgtgtttgcgcacttcattgctcgtcaacgacaaactccatttatgattctaacaaagacaaagatattcaagattcaagaacgaagatctcaatgcttaaatatagatgcgaatacacatacaagagtgtggggacaatttccccctcaagatttatttatttatttgtatgtgtaataaataaataaataaaatttcccccataagatagttttctttatatgaaggtaaaaaaatataagaaacaaaaatatgatataatttcactactttatccttttaacttgataataaggatgatgaaaagatcatataatatttttaaagtatgagaatgcatagatgactatttaatttgcagaaacttcaattttagattattttttgttatgacattatgcattttgtaaaagtttgtgatatttattttttgctaaaatattataaactattgggttattatgttttttatccctatactttttataaaattcacttatagtcattaaacaattttttaacattttttgtccctataattttcttctattaatagttttagttcatgttggtgagtaacaacgttaattgattacatatacaaccatgttaattgtcaagtaatcaatcgtattaggtgtccaataacttgtcacgtcaacaaggagtatgatgcgggcaaccatgtgtaactttttaacaaactatatttttaatatttcatctatttagattataaacataatttaccaaaaaattacacgtgattacccaccaaacttcgtgatgatgtgataagtcattgagctgctaatgtgaacttgatattaaggactaaaacaattaagaaaaagaaaaaagtatatgaccgaaaatactaaaatttgtgtttaggagctaaaagtgaaatttgcaaaaaatttaagggccaaaaacataattaactctatattttttcttatccccactaagaaaaactaatggatctgccactgctcaagtaccctcgctcttaagatccctttatctacatctcaaacaatctctgttcactatgttgtaggttgtttgttacaaagccgccattcatgccataatacgaggtccaacaacattctccgtgaagttagcaacctggttgtttttgttggccatgacgaaaccatgacaatgacggtgctactatgcccaggcaattgttgtcatgaatttggatttaataatttgagatatagctgccaacaagatttcaattttagattaaaaagattagggtttgtcgttgactagcagcgagtgggctaaaatgattgtggtttaatggttgtggttttgatttgtagttttggggttatggcttgaagaagataagagaagaggggttcgaaaatttgtagtggattcttaacattttgtgacaatttttaaccccaaaaattgtattttaaaacttaaattagaaatcgtaggtttgaatttacctgaacctacattcagatcaaaatatcacaaatttcaattttgtgcctacaaaaaagtactaaactttgtagggacacaaatttataatattttcaattttatgatgacaaaatgtaaacgacattaatgaaatattcataaaatatttttatataaatttcaattttattttatggataaaaatatattttgaggtgttataattttagttttttaattaattttaaacctcttgtaatttcatttatagatactttatttttattatatttttagtttcaattattttagttttttcatattgtgtattctattatttatatatactgtatctttaaatatttttaatcaagtttaaaataaagtaagaacttacatttaagtagacattaaaattttattgtgctaattagcataatagttaaaataaatagtctaacataaaataaaggtacagactcaaagctaggcttgtggctcgtggattcactcaaacccaaggtatcaactactttgccactttttcaccaattgcaaaggtaaacacaatttgactacttttggccatcgttgcaacaaatcaatggtccttgcaacaacttgacatttataatgcattctttcatggaaatctcaatgaagatgtgtatatggaacttcctcgagcatttcttttattcaaccaaactaagtttgcaagcttaagaaagcactgtatgccatatggtttgaaacaatcaagcagataatggtttgctccactcttttcctctttaataaacaaatgattcacttaatcttcctttgatcactcattattttttaaaattcataaccactctcttattgcattacttgtttacgtggatgatttgatccttgtaggaaacaaccaacagcaaattaatgacactaatcaatttcttaataaacaattcagaatttgtgacctcgacaatcttaaatactttcttggattttagattactcagtctcatcaaggaattcacatttgtcaaataaaatatgcattgaaaatactttctaacatggggcttatggcttccaaatctgccaacactcctatgataaaaaataccaagcttcacaaagataatgacaagctcctagatgatccaacaacctacaaatgtcttataggcagactcttatatctcaccaacactatacctgatctctgttattcaatttaacagttaggccaattcataagttttccaaccatctctcatcaccaagttgcaatcaaggtactattagagatttttcgtgtggtcaagtgaaaccaagtttcgaggtagtgtttagaacttgcgtccaagtcgtctcccaaaggacttgtggtaatttagacaattccaatcaaaagactaaagttttgaaaagtattttctcaatggtttgtgtttgaataatgaaacaacaacgtgagaataaaaacaagtaataaaaaagagaataaaggaagaaacaattgcaacgttgttatgagaaggatggtttgaacaaccaagattgaacttggtttccccctttttcaatgtaacaacatcaatgaatctagttattcatgtaatttatctctaattcacagatatattctaaccttaatgtcttatgcggaaaagtctaagtcctttagattaatttccaatatgttggaaaattgatctaaatgaccagcattaatgtttaaaaaatttaaagagcctaattagtattgacttatgtctagaatcaatccccattaggtactcttcttatttcaggaatcaaacaagtgtttgtcaactaaactattgattcctatgatcaagctataggtgatcagtctaaaacaaacattaagggaaaaagaagaagaataaaactaaataattgtattaacagaggattataacatgaaattaggttcagtcattttcaacccgacagatgaggagattagctggtcatagcttgattacaaatcccataaccaaacatacaaaagagtaatgaaataaagataaaatccctaagaatggttctttctttcacacagaattgatgtctcaaacctgagtgaatgccatcttccttcgcacaccaagtttttataatttgatataagcttgggccttatgtgttttcctcgcttaagcatgagtaatgcctcgcttaagtgaggcctgctgatcttaaaaggcttgactactgactctcctagcttaagcgcatagaatgttgtgcttaagcgatggattcaattttctcctttggcttgactgcctcacttaagtgccttgaggcttatgcttaagtagtgctgtcaaaacgggcccaacccgtgggtcagcccattttggcccgcaaaattggtgggttgggttacaaaaaagctggctcaccaaggtcccgggtcatttggacccggctcacttaacccgcaacccacccgggttgaactcgggtgagccgggttggctcgcgggttggacaaaaaaaaaagataatggaaaaaatgaagatgataaaaatgaaattgatttgtcaaaccatgattttaatactcttcctagacaagttaatattgatgattgagatatgagaatttgatatttgaggagttagattggtgttttattattttaatattgttgaacatatttatatttgtttgagtttcatgtacatttagtttgaggttaagtttgatgcagtttgtaatatttaaatttacttaaattggtttaatttgcatttttctacacttattttgtgattttttaatattttttgattttttttaatttaaagtgagccaacccgcgagccagctcactagccagctcgcgggccaactcgtataacccaccaacccttgtgggttgagctgggttaggcaaaatctgacccaccaccaaagtgagccaacccggttcggctcactttgttgtcaacccgtggtggggcaacccgggtgggccgggttggctcgttttgacaggtctatgcttaagtaagggtctccaatgcccctagagctgtttaatgacttagctaacttaagcgcatagcatgccatgcttaagtgagcttggcttcatcatcttcttctaagttcttctcgctcaagtgtcgtccaaaaaggtttgcttgaacgagtcatgttagtagctcctccgattacttttgtcttggctcacttaagaacaacaacaagcggcacttaagcgagaataacttcatttgtaattctgacccaatttcctccaaaaactcacaaaaacataaagaaattctaacaaattataactctagaggtcctaatttatcctactttgagtcaatacaagttcaatgtataaaaaatgctagataattgtgttgattcatgtgtgaaattaagataaaattgacaattatcaggcactccactacatcaaagccacccctgcccttggtctcttctattctattgattattaacttcaacttaaagccttctcggattcagactgggcaagtagacactagaaaatccataatcggatattgtatttttcttggtgaatctttaatatcttatcgttccaaaaagcaatctactgtctcacgatcctccactaaagttgaatattgcacattggcttccaccacttgtgaaattcaatgactcacctacattcttagagaactacaacttcctttcatttcactagctctcctttattatgacaacaagtcacctatctacactgcaaccaaccctaccttccatgagcacattaaacacatcgacattgattgtgacattgtttgtgagaagctttaaacaaaactcttccaccttatccatcatatctaccaaagaccatattgcatatatcttcaccaagccccttgatttcaaacctttttcacaatctgttgtccaagctaaaagtgtcaactatctactcttcaacttttgggggtaaaggaataatcacagaaagttagtgtaatggaacaattaacgagaaaatattttttttttctattttttgtcaggactcttatcccttagtttcacctttccttttctttggactctatacctatatattgagacccttaattgtatcatttcagatttcaatctcaattcaataacaattcagttttatctctcttgagctctgataataacaagctacagatgttagatccttatataatatttcttcattcatttgttaataacaatgttgagtctattaataatgacaacaccactttaaatttgaatacccgaccaagtcagagtcagttccaaacaaatagaagaaaagtggttaataacacaagtaacatgtgtgttaatctcatgactaaatttatgaacacaagatctaggagtaatgtggatactggagttgctgaaaatattcataatgagcaaagacatccaattgccaatgaaaatatttccaactatggaatgatacatcatttgaaagcaaccacgcatctaattagacgaagtcaacttgtaacaccataagtgtctacaattcatgataacaattataaagatggccttataggtagaatttattatggtgatgtaaatactattttaatttcttatcaagaaatttaaataatgcaaatcttattgtactaatcatttaaatgttatgtttcacaacaaatgatgattcaaatttttgtcaagataatttatactcattctggtctcacatataagaaaaaaaacatgtcacgctaactaagaaagttagttaccacttttaattacattaatttcaattaatatcattttttccaacttatccttcattggaacttagtatgaaggataaaaaagagtcattgaaactagcacctcaattaaatgaagtgtattttagagatagtaacattaaataaggttaagttagttgatttttttttatatttaagaccaaagacaatgtgaaactaacagttctaatcatataaaaaattatgatacatgtactttatttaaacttatcaatgatataacccctaattaatcacgtatgcttatcaatgatataacctcgatattgaagatcttacctttctttgtaaatattgtggagcttatatgtgatatgaaaagagaatgagaaaaaatacaaatacttcaaattttaaaaaaaattgtttgttgtggtgttataaagattcaactacaacttctacaagcaaccaccaaatcctcttcagcatcttctaattgataaagattcaagtgataacaaaaatttctagaagcatataagttcttataatatgatgtttgtgttaaatcatcgagagagaaattggacaaatcattcaataatggcagatgatcaccttctcttagaatctaaggccaatcatatcacctaattggtaatttgttgcctatgttaggacaaactccaaagtttgctcaactttatctttatgatacaaaaaatgaaatccaaaacaaaatggggggagggagcaaacctaattgatctttatgtctatttgtttacttacattttattacaattctttacttacattcaattcatgttctttaatactccaaatattatcttctatgttttaacttctctaattttatcaacaggtctaaaagttatattgatccataaattttcagcaaattgaagatgatgcttgatgaatacaatgtatttgctcaatcttccaaaatggctaaggagagatttgaaacactacaacaaaaaaaatctgaaattaaaacttatttctaatagagtcattgatggtaggatttataatttgccaactgtttttggagttgttgctcttataattggtgatacaagcattggttagctgtgaatctgatttactcacattacacaaagtcccccattaaaaccatttctttggcaaccctccaataaagatgttaagtcacatttagttataaaagttgaaactcaaaattacccctcatctccacaatcacatacacactccctgtgttttatacatattacacatgcatcccttgtgtttttcaaacttatatttgttggtgatatatgaaaattcatggtgccaagtctatattgttagaaggtaaattgacaagttagatcttaaaggatcatggagtatcgtgcataatgtttgaaaaacatgagagggaatgcatatgtaattgtggagatgatgatgatttgagggaaaaaaattacttacaaattatgtgctaatcacgtgatcaaatgaacttaacatcgtttagagcaaaaagagtgccaatgtggaaatgcaaaagttagatgatttttttgttgaaaaaaagagaatttttgtgaaattcataccttataaattagagaacctttggaaggacatatgtcacattttgagcaaagagaagttacttttctctttcttcctatgtagttctttctcttatattttctcctccttcttttttttatgtgtttttttattagatcatgtgtttttttttacattctttctttcttctttctttttatgtttttctttttttactttcttgctttattttatactgttttttagattttctttttatgtttttacttctttgtatttatcattaaatttatccatgattgttttttattatatattattttaaatatattatttatatatatatgacaaaaagcattacatagcttcatttcttaataaataagataaaaaaccctctcattttattggttaaaaaacattataaattatattctaattcattaattttgcagtaaatttttcatatttattgtttattttttattatatttttagtaatatgatatatagtgataattatgaaataattaaatattaaattaaaaaattggtcatttaagaacaaaaatatttttatcttcattaaatgaaaactaaaatccgtcaaaattaataatttttaacaaattttaatcaataacaactaaagtatgagaaaaaagggtcatatatcaaactattttttttatatttgtaaaattattgtttaatattggatattatttatatattatattataataacgatatagtgatattaaaatatgtcattttaaactaattaatactgtttaatttttgaattatactatataaactaattattttaatcttaaaaaatatgtttttttttcaaatatgtataatagtgtaagaatagattattttaattacataaacaactctctcatcaacaaatctttggtttgagtaatattagattcatccttttaagcaaaatcgtcaaatctctctctagatattaatcattaataaaattgttgaataatctacatcaatatcataataaccctaaaaagatatactctattaagtgaatttatttacattgaaattcaattgtatttttttaacatgtattttatcttaaaatttacttatcttttgttttttttaatcctaacactatcattttttttatattaacattattcaatttttttttatatttaggataattatgttaagctaaagcaatatatcaaaacatttataataatataataatataataataccccttttaaattatatatacaaataatttcaaaatatgtataaattttaaagtgatcccatgcaatataacacgggtatcacagtagttccagtaaaatactaaaagtactggtgtaatttattactctttacaaaaaaaactgtcagatttctgacgtgagtataacggtgaaatcccttgtgttgtgaattctttgtgttgtgggcttatccaagtatcgtagcccttaccataccctaatttttctttcttcaaatcgcgcgcgctcctcacttcgagtcttcgactttcctcctccgaccatctcgccggaatttgccgcggcggcgctccttgtcgccgcagcttttctctctactgaaaccctagagagagaaaattcaacaccatttctctactctgaaattcataatccctgaaattcaaaaaccctaattcccctgtcaagctcgtagcacattcacagccatgtacggcggtggtgagtatcaaaaccatttccccttctcattctcttttgcttctgtgatgtaaactcaattttctccctttggttgaatccacagatgaagtatcagctatagtagttgacttgggttcacacacttgtaaagctggttatgctggtgaagatgctcccaaggctgtgtttccctctgtaagagttttctatactctttttacttttctaaagttttgaatttgttgttgtgtttactgttttgctgatatcattttaccatttattggcctatagattacgaaatgttgttatgctctcagttaatagtgaagaggacactgacatttttctgtggtgataggctagttagtactgtttgatagtgaacttatgtatttttataatttatagttgactagaataatttctggaaattgtatgggtagtttgattgttgataatgaattggtggttgtcttggcttgtgcaaacttaggttgtgggagcaattgatcaaatggatgttgatgaagcagataatggcgaaaacaactctgcctctgctccagaatcaattaataataatgttagacatgctgattctgacaagaccaagggaaagaggaaattgtatgtaggatcccagtccttggggtaccgtagagaccatatggaggtaacccttatgtaatggtttttgtgattggacttggattagtaatttacagatttttttgttccttaaaataatgaatagtgtagttattttcttcttctgtactgttaggtgctgtctccttttaaagacggaattgttgctgattgggatattgttgacagcatatgggatcacgccttcaggtcaatactgactttccaatctgtctgtgatatgtattgtaggattattgttttccattttgcacttgtttattgttagactattgatatgatagagcaattagttgcaagttgttacaatttaaattcaagttatatataatttagtagatacttttgagattgttattcctctatactctatatatatttcttgtacactcacaattagatatgaataagatcctaattattccattctttcaatatggtatcatagagtcaggagcttaacagccaaattgatcctttttcttttctcttctttatttttttgtttcttcatggtcacctatcaatgcttccaatctatccattaaatgtagcctctgccaattaccaaatggctcatctccttgaagccaaaacttcttggtggctatataacgaggatcaaatcatgtccttcatccgaaatcattcatgatggttaagcgttcttgcttctgcctttttaggtggttaagccatttttcttctgcctttcaggtggttaagtcatttttttggcttcttccttataggtgattaagcagttttttgcttctgcctttttaggtggttaaacctttttcttgtttttgtctttttaggtggttaaacctttttcttgtttctgtcttttaggtggttaagcctttttgcatctgtcttatggtggtttagcgtgtttgcttttttaagaggttaaaccatgtgttatgacttatgcttaatggttaagtttgcatttgttggctttgatcaacgttcggactttctccccaaatatcttacattttcgcaccacaaatttatgatgaataagattggcattgtctttgccaccaccatcttgcgggggcgtgtcagactattgatatgatagagcaattagttgcaagttattacaatttaaattcaagttatagataatttagtagataattttgagtttgttattcctctgtactctatatatatctcttgtatactcacaattagatatgaataaaatcctaattattccattctttcaatatttattttatggcgtatatggctagcattttataaagctcacgtgattcctttttttttattgaaatcccttgatgactgatgattcttctcaaaagcaatggtccaaagaatagttgacctgctacctgtatctgaagcacagaaatacatgagaaattctggtagtaatggtgtctaattaatgattgatagtaatcagtaataaagattttttttttttcaaacatcaatgcctcaatggtccataccataaatatttatcaatttttttttatagtaatcaactttcttttcttttacattggctgttcagggtcttgctcaacccttctctttcaagtttcaagtaagaattaggaacattgcacgaacacagggatagttagctagtgttgagtagcaatattttggaggtgaaaattggggatcacatcatagttgctcctaccacaattgcacattttagttttttttttttttttttatcttacaaaataatgggagagattgagggggatgaaagcatatgaatcaaactaagtgaactaacatatagataattaaggtcacaatcgaacttaaaagaaaattctaccagatagctataagatcagtgatgctttgtatggtagtgaatgctggacatcaaagtgcagaagagatttgataagttgaggtggatatgcaaagaaaggaaagataagatcaagaacaaagatatacaggaaagagttggagtagcaccaccgaggagaagataacaaaaaaacacttagaaattagaatggtttggtcatgtgagaagatcaacaaaggctccagcaagaaaactgtaatgcaatgaaaagaccttacactaaatggatttgcggaaaactgtttttgatatagctctctctatattttttgatccatgtaactaaccctacctagtggaataagtgcacgtttggatggaattagttttgaagatcataatctgattgatagaacaaaagctgtttgtgtcactaaggctttatgatgttgttggtcgttcttttcctattctggttttgaccatttttccattgtatttttttatgtttttttatttcatataccttacgaattgttttatttgtcactgggcacacattttttttttggtagggaatggctattgattgggtgtgctttctttttttttttggtagggaatgcctattgattgatcctaaagagcatcctatgcttcttgcagagccttcttctaactctcaacaacagagagaaaggtattttggttatgatttattgtctagaattaatagagctcagtttaaagcatcatatgtatgattctgttttttaatttttgcaggacagcggagcttatgtttgagaagtacaaagcacctgcattgtttttggcaaagaatgctgttagtccttcactgacctacacctttaaaaataatatatgtcatggagtgagaatgaaaaactactgatgggttctgacttgtcttgacatacaggttctgacttcttttgcatcagggcgtgctacgtcattagttgttgatgggtaagagatcatgatgttactgaatggtagttttgttcttattctgcagtaatatcaatatgaacaaagaacactgatctttctcttcatttctgtataggtgtatatcaattgcttaccttttaagatattatatatggaagacctatgtcgtagttgtcttgtttaattataccttacatgtcttactttttccaattatagtaggagaatgataggaatttggaattagagaacaaataatggagatcaagctcctaagaagcagaggtagctctctgttgagacttgagactaaaatcaaagaaagaaaataatggggaattatgcagactcacagaatatccactcctcctaaaccctctcgacctttaaaatcttgcctatttctttaaaattcttccctcttactttatccttatatccaaccctcttttttacacactcaatgccatgcaatgcaatcagtctcagtcagggttgttacattccaaatttctccttagcccctgctcccttatactgtcctcaatgtagtagtcatatactcgtataaagcctcatagagggcattagactttgcttaagtagcaggataagggaagttttatgtatttaactgcaaccaatggatcaaaagagttgcgaatggcacataataaaattatacttttttatttcagttctggaatagaaagtcttaccattataacagttaacagtgagaaataaaatatcaggaggatttttacttattctgaaacattgttaaataaatgagtaaactgtgtaccttaagttgggggataacaatctgaaagtttctttattatatatatgttaacatgtctaaagattgttgttttcctgcttgaccattttaaactgggtttggtaatacacaattagacatttggcaatgttccattccaaaaagtggaatgggtaaagcagcattttgaatacatcggaggaggctgatatggatgaaagttgaattcctactatttgagtcaaacactgtggattgggtatttgggtggacctttatgcatatgagattaagaattcaattgaaaaaagtcaaaaactgaaaaggggagagagaaatagttaacttttaaagttcaatatttgttattacttctaatatgtcccaataacatgccagaagcattgctgataagatgttttcttcattattccattgttttcagtggtggaggatcaattacagtcgcaccagtacatgatggttatgttcttcaaaaggtacatgatccatattttgattgattgtttgccaatttattatatttgactttaatgctgttttaggaacctgcattgatccaatttcttgtatgcaccactctgattatggataaatttgaaatgatgagattgtttgattaacaatgggaaatatatacattagatgtatgaacgaaaatcttgacaaataacctggtagtagagtcgtcttctgattatgtaattgctatttttgtctattagtaatttttggttgtgtagccaactgcaaaaagcaattatataggccatcatctctatattattactcaattgttagattgtgttttacaaaaatacaactaataattcaaaattgtacgacagtggctatgtttatgtgaggcactattgcttgccttggtatttactaactaatattgcttcatctatgctctgcatattcgtaatatcttccattctgttttctatgtatatgcatgccgcatacacacatacacatcaaattaatttaagacctcattgtactcagcatttatatttgagtcttggctaatactatgggtctttctgtctgctcatattttcttctatgtttacaacataaggctgtggctacctctccaattggaggagaatttcttacagactgcttgatgaaaagcttggaaagcaagggtattacggtgggtgacaaacattagtcattatttttatcagtgatcttctgaaataaaggtactgtgattttatctgcctgagatttccccacttttaattgccacagataaaaccacggtattcctttaggagaaaggaaatacgtcctggagagtttcaggtataatttgttttcattttaatgacctgtgagtaacattttttaattccattatcttgcaatcattgaagtgtgaggcaccagacttgtttttttactgttgttttcattaaactttgaacatgggcaggatgaggttccatcccatcccatgtgtattatatgtactgtttgtgcctccaggatttctggatggtttcagtacttcatttctcatctcttttaattgagtgttcttcttgaattgttttcagtcatggataaaattcgataaaaattgcatgtgccagtatactgctgctagtgacatgagctgaataatttacctcttgtttgatctactagaattaggttatgtactaaatgtttgtgcaagttagcaaattaattttaaacttaagatatcaaacagagaatggtgttatcctgttaggtatattattaaggatcagaacaaagaagatggagtgaggtgtagttatctttctttgtttatgtcaattacatatataaccttgcatctgttgttacttgtagaattttggtggcaaatgatagtgagcaaaattgcccagtgtttctctttattagtagctctaaaatttagtttcttgcatgtatctttctatatgattttggttgtaactgcaattctatgctttaataattattatttctcattatcatttttttcttctgaatcttacagacagtagatcttgagtttccaaatacaactgaaagctacaaactctattcccaggtttgtgaatgaccatgtaatatctcattacttgttgcttttcatttatctgatgactgttcttcatgacagagggtgattgctagtgatatcaaggaatgtgtgtgtcgtgctccagatactccatatgatggtttgtttagctcttgttgtcatctcgcataatgttttgaatcttactggtcctttacttttgttcaaatcttattggtcctgtatttcattttgttctttcgaaggcatgtggaaaatttcctagtttttatggtgacaacttttatttcttttgaactcctttctctctgtatacatcttagataactatatatgtgatgcctcttgtgatgttattttctaaaagatggctttacctttttggttccaatagaattgcagtttctgtacattaaatctgtttgttccccttttttctgacagagagtgcatattctaacatcccaatgacctcatatgagcttcctgatggccagtaagttgatgttattcttgttctttgaaatagggaggtggatggaatgaataatgtttcatcttcaaaatttattttttcattttatatgctactatatgtacttcatagcctaattgttgcttctggtttttctgtaatttattgtctgttgttgttttgttatgtgtttgtttttattatgcaggacaattgaaattggatctgacagatttaagattccagatgttcttttcaatccgtccctggttcaggtgtgcggcttgcattcaaagatgtgattagtttatcttgttccttcaatgtaaaagattataatttataatattgcatgatattaaaaatatgccaaagcttcttgcaaggtattaaaagtaaaaaggtgtccttaatgtactaaggactcctagtgccttgaggtgaggtgccaaaagacatgcctcactgaagattggttttaataattgaaagacagtaaaacaaaattcttgctataccacaatcacatccgtgttccacccttttatactatgaacgaagaaaaaaaaatacaaattttatcactcaagatgtttttggttaaaaaatgataaattttagttatgttaattaaaaagctgttaaaaagcacagcttgtgacatgactaaaaacgaatataggctataaatatatagaataaaaactaaattattgaagtctttccagtgaaattttctgggtggtgattgtttttgtgtgcaatatgactggtccactttttcttgttcttctattttgttctgcagttctttaaattatttgagagtcaatattcctgttcttttgttctatgtgctaattttcttatttgtgtcaaatgataattacagtcaattcctggcatggagagctttgcagaaattgctccttcagttcgtggcctgcctcaaatggtaatttaacttgatgtgaatctgttttaagtatctaacttgctattgctgatcgttttatcattttgcaggtgattgaaagcattaataagtgtgatgtagacattcgaagagagttgtttagtagtatactggtaaagtttatttatctttgccttctttctacacacactcaagaagttcttatgtagagcttaatttagttcaccgcagacatttttggtgtaaaaaggaaaaagattcaggggcatcctttatatggagaatttttagagttatttttgatattgggttgtgtgtgccagtagtgttgctgaagttgttatttcatgatgttaacttattattttcatcttggttggaattctatttgagttgtatttaaggcaaatgacctttttccctagaactttgaccaacatatatttgctgaaaccatatactgtacatttattatgtatagtttataatcaattgataggttttgaagcatttcatatcaatatatcatttcctggtaaattaaaattgatttcatttatcccatgcagcttgctggtggcacagcttcaatgcaacagcttaaggaacgccttgagaaagacttgctagaggtacattttaacaaataagtccttgtctatttcatccactgaattgcaatatggttgttggtgctgagttcaaatacctttgaagcttatgttgttttaacatgtgatttcaaggggtagctttcatttttctttcaagtgaatttagttggtgtctcatcccaaatatcagtagtttggacaatttttactttgttgactgccataatacagccttgtgggggacttgtttcttatcttacgtgcagtagtgctacagagttttcttaaatcctgtgactccgaattttcactatctaattttggaggaatgggggtttgggagattgagtgtaagaatttacagcaaggacttgtgcatataacaacagcaagaatttttgaaattgtgcatgtgcatataaattttttaatttgtagccaaaggttttagtcttgtcatttttctagattagaattaaatatatttggctgtgtagtttttgttgttttttttcttccagcttcttgttacttccaaatgtaattttgaagaaaaatctcttatggtttcctttgggtatttcttcgatggaacttgcattaggcattggagaaatcttttgggctaaaatattatatatatatatatatatatatatatatatacacacacacacacacacatatatattttctttggttgcttttgggaagaaattgtgtgatattgtaagttgttttttttttactgaattacattaacaattaaaaaagttatatagttgtaaagtacaatggtccgtctgtacgattgtgctcaaactggactataagcatttagccaaagcttctgcaggctggcacctctgattagagaagataattaagttgaaaacatttgtcaaaatttctcttaggaatcaggtttgagtttataatattataaaaacaacacattggttctttttgaattaaatcatcaggtggcatgtgattgcccttgttcttcaagaagctggaaaggttaattgtagctttaaatattgactacaatttcatttccgttgcaggagtcccctcaagctgcgagagtaaaagtattagccagcggaaatgctactgaaagaaggtttaggtgtgttatctatcttatgtcagtgcatctaatcagaggtttagatgtgttttcttttaatgctaggtttggaaaacctttctaaagcttccccctcttttgcaaacctctgattatgattccatttctctccaaaactagagagaccgagatcaacattttatgtggaagtagtagtagttgatgcattgtacatattgtgtcttatagttctaactcaaaatgaatgactttatatgcagtgtttggattgggggtagtatattggcatcacttggctccttccagcaaatgtggttctccaaatccgagtaattataaactgttcaccaaacttgcgattatactagttcattaatgttgatatatatttcactttgcctatcttgtttctcccttttctcataaaagctacgctgccaaatcgggctttcattaaggataattttacactgaatcattttaatgcatttctgataggtatgaagagcatggagcttcatatatccaaaggaagtgtccatgagctgctgttggtacttgtacaagtttattttactgccatttatcaggaagtactatgaacgctgatgtagtgattgtctactaatggatttttatttcctatttaatggccattcccattagatcccaattctaactaaattattggcctcgaggtgaatcacagcccacctttaacgaatcttgtgatgatgtaaaacttgtaagggatgcgttacatacaccattagaatttctaatacaccattcatgaacagtgcatttccaatattacccttcacttttctatagcttttataaacggatccgtataactcatacttacggattggtgaattcgtaagatttttacggatcggcgaatccgtaagaatttacggatttgtgaatccataagaatcttacggatcagcgaatccgtaaagaatgttttttttttttttttacatgtacggattgggcaatccgtaagcccaatccgtttgttttttttttttggaaagttaaaatatatgttagaaaataatggtgtatgcaggtatcgaacttgtgacctttaagttattaatacgatgttctaaccaactgagctaatagaccaattatgttaaaaattaattgatattgatattgatatatatatatatatatatatatcactaaatttatttaatttaaaataatttattatgttaaaaatatatgtgtattaaatatatattaaaaaatttagtattatattatcaacattaattattttttaacataattgagctattaatttatagtttaatttattatttttaatttaaaataatttattatgttaaattttataataacattatatgttaaaattacatgtggaatgaatgcatgcagacatatctgtaaattatatgtaaaatttaacatataatttacagatatgtgaaataaattaatgatatgaaataaattgttagctacaaaaataaggataagaaacattaaaaaaatgtttaagaattaaaaatgaaatttacaaaaagtgtagaaataaaaaaacatttaaaaaatatatatataatttacagatctgtgaaataaattaatgatatgaaataaattgttagctacaaaaataaggataaaaaacattaaaaaatgtttaagaattaaaagtgaaatttacaaaaagtgtagaaataaaaaaacatatttaaaaaatatatgttaaattttacatataacactaaatttttcaatgtatatttaatacaatatatttttaacataataaatttttttaaattaaataaatttagtgatatatatatatatatatatatatatatcaatatcaattaatttttaatgtaattgatctattagttcagttggttagagcatcatattaataacttaaaggtcacaagttcgatacctgcatccactattattttctaaaatatattttaacttttcaaaaaaaaaaaaaaacaaacggattgggcttacggattgcccaatccgtacatgtaaaaaaaaaactcttacggattagcgaatccgtaagaatcttacagattcgccgatccgtaagaatcttacggattcaccaatccgtaagtatgagttatacggatccgtttataaaagctacagaaaagcgaagggtaattttggaaatgcactgttcatgaatggtgtattagaaattctaatggtgtatgtagcgcatcccaacttgtaaagtgtgcctagagtctgtaacaattgccccatttatgaaattagatctctcctgtgtacgtctctttctttcttgggtaaatgcacatactttgtcatgacttgaacttacaaaataagcctctaaacctatctttaaaatttgtagaaatattggaagtgttcctccccaatttgattcattctaaattaataaaggtgttcaaaattgaatcaaatgatttgtagctagataatttcataatttgtgcaagagtcgagcaacaaaagaccctctacactacggagatggtacttttcaaggggattaactttctacacaagtcatttttcccatacactcagcatgtacattgtaatatcgattttgtctttctcgtaatctgtaagtttcatatggaaatacatcattcagtttattatggattgtcgatcgttaagagtcatatggattgtcaatctatatgactcatacagatcggcaatccgtatgagtatatggattgacaatccatatgactcatacggattgccaatccgtaagagggtaaagttggaaataaaaaaaatatgttggttgtattagaaatatgttgggtgtaggaaatataactcattttttaagaggaacttgtaatcctttcttgcgcatatgccaaagtccgcaggctcgagttgcaatgagcatgttggccactttttttgttttttgttttttgcatttcaccagcccaacatcatcaagcttttgagggtttaactttctacaccagcgctttttcttatacacccagcaaaaatgttatattccaagaatgccctttgtgttttttgcttaaaacagatactcccagcaagcttttgttccttttttcgttggctgggtcgttgcctctaagctgcagtttttgatctccggttggtggtgttgttttggtggtagcggaggtggtcgtgactcgtggtggttgcttggttttggttcgtcggatatccgtcagaggtatgttcctgcacttgctatgatcatagacagtacatacggattggcaatccgtatgtacttttttttttgagttttttttgtctatgatttttaattaatatatttgtgagctgtgtatttttggttattgaatttatattagtccgtttaagtaatgtagtgatctatatgaaaataatagtgtattttttttgaatatgattattatgcatatagtttgttaatgataatttattttgaacttttttattaagatggacaatgaatactgcatgcatgatagtattaagtatgaagaaatgaatatgactgaagacaacgaaggcgaatcatttgactttgaaaataacaagtcttcaattgattgttcagatgcgttcaatacttcaaaggtatttatataatatttcctgaaaactagtaaagaaattttttcataagattaaagatgtattctgaatttttgtaggtgtttaattcttgtgaggaggtattgcaatgggcacatagtgttgcatataagatttgttttgtagctgtgataatgaggtctgacacaacaattggtaagaggggaagaacctcatttattttgataggttgtgaaaggagtaaaaagtatagagcattcaagaaagatttagtatggacgaccattagcactagaaagtgtggttgtccttttaagttgcgagggaaacccgtcgtaggaggtgaaggatggatggtgaagttaatccgcgggttacataaccatcatttggctaagtcgatgactggacaaccatatgttggtcgtttaactgaggaataaaaggttattgttgctgaaatgacaaagtcaagggttaaatcaaagaatattttttgactttaaaagatcgcaatcctgaaagttatacaacaatgaaacaaatctacaatgcaagatatgcgtaccgtacttctataagaggcaacaatactgaaatgcaacagttaatgaaacttcttcaatgcgatacatatatccattgacatagagtaaaggatgaaaatgttgtacgagacatcttttgggaacatccgaatgcagtgaaattgataaattcatgtaatttgatattcctcattgacagtacatacaaaacgaataggtatagactctgtttgcttgacattgttggtgtgacacatactgggatgacattttcagctgcttttgcgtatttggagggcgaacgtatcaacaatcttgtctggactcttgaacgatttagagggctttttctaaagagtgatgttttccctaaagttgttgtcacagatagagatacaacactgatgaatgtcatcaaagatgttttccctgacacaaccaacatgttgtgtcggttccacattgacaagaatgtcaaggcaaaatgtaaaacgcttgtgggacaaaacaatgcatgggactatgtgatggatgcatgaggaagtcttgtagattatgcttctgaaaatgcatatgatgactgttttatgaagtttgaatgtgcttgcgcaccgttgtcaatatttgttcgatatgtgaaagacacgtggttaattccccacaaagaaagatttgtgacggcatggactaataaagtcttacattttggaaacactactacaaacaagtaaatgtcatttccaaaccggtagccatactaattttgcttcttgttagtttcacttttagcagtgcaacaaaaatgaatgctttcatcactaatacattgtctaaaatacatagccacaaatataattaagcttaattacaatactctagtacaatatgcaattttggtcatctagtttttctttaatttttgtgatattggtctcatttttttttaaaaaaattgttatcttaatctatctattaatttgtcatacgatacttaatggagatgttgacatgttgttcatgtgtttagcatttgtcaactccatgtataccactcatgtcagtaccttatggacatgtgaactccatgtgtaattgctattcagcatcttcatcaaattttgaatgccaattaacaaatcaacaaaacacataagtacttatttgtcaagttattgttctaatgctaaaataataaagataaacaacaaaataacacaaatatcacaatttatggagaaaaataaaactttactattatatatataacaggctacatgcttcacatctagggaaagctataacggtattttggtaggaactaagatgaatacttctacactaaacaatataaacttatttttcacaaaaaaactcgttgatcacatctccaattcatatacattacacaataattaacattttttcaaccaaattacctttacacaataatttgcattttttttcaatcaaataaccacattttaaaaaaaaaaaatatttaatacaactctcccttacggattgacaatccgtatgaaagttacgagttagcaatccatgagtcccatacggattgacaatctgtaagctccgtacggattggaaatccgtaagtcccatacggattgacaattcgtatgaggtttacggattgacaatccgtatggggcttacggactgacaatccatatggggcttacggattgacaatccgtaagaagaaaaacattggaaacccataaacctcatatggattgccaatccatatgaggtttacgggtttccaatgttttccttcttacggatttcccatccgtatgttgctttccatattatccatgtataattggccttacgaattgtcaatctgtacccatgaacacccattcattgcctaaatcaacgtaaacaacaatgtcaaaaatgaaggcaagaacttacgtggaggacaatggcggaactcaaatgattcaaccaaccacgaacgcccaacttctgtgttgcttaatggggaggcggagaagacgaacaggatgacaaaacaacatagaagagaagaaaaaagaaagcgtatgaatggtgtatgcgaaaaaaaaacactgtcattacttaaccacttttagcgtgggcattttcagtattacattattcaacattgggtgtataagcaaaagtgctgatgtaggaagcaaaacccagcttttgtctcagatgaagttgagacccattttatataagtgtatgcttcgacaattttgcttgtgaaactatttcccatcttcattgtatcaaagtcactattttggttggcagtgaaaaatccctaaatggccaaacacctaaagcaacaaacaatccatgaacaatgatctcaaccaaagttgtattctccatgaaaaatacttcatcatcttgattttctactatgaccataatgttatattttttcattgaacaatttggtatgacttaatagtgtcagcattttgaattttgcttgagataccgacattgagacttcttattctgacctatctttctacgacagtaacaagtgatcttggagggttgagatttagataattagaccgctttttaatattcatcactataatttctacttacgtttctttcacaagtctcacgtctcccacaattgtctacaatcttatattggataaccatgcattgttccttcctcctaacttcttcgttcaacagcttgtggtagggaactatatggttgaaggacttgtaattcatcaagccctttgaaattttttatgttattgatcatgcgttgaccatcattgtatatacttcagttttatcgttatataatgaaattaattctagctaaatgaaaagataaggataatattgatttttttaaaaaataattacaaaatatttaatattttttagataattattataatgattaaggattaagagtgtttatcagcttgatgattttcaaaactaggtttaaatgtacaatgtcactggagttaagttttagatatccaaagtgtttaatttgataaaatgcttcttattctttttttctaatttaataaaaaatttaaaagttttatcttattttcttatttttgaaaaaactgcgtgagaaattcaaactataaaatattgaaaataaaataataaagtaaaaatagtttgaatttcattaattttcgtaattattgaaaaataatattccaaactaaagagtttttcaatttttttcttcctttcattctcttttttgatttgtgtagtaggatgtaatcatgggaattgtatgtttatttatctaagatttaatctttcatccatctcatattatttttttgacatcaatccatgtcatatgttcaaatcctgaatgcgaatattgtaaaaaaaaaaattgtcttttaaaataatatgcacatggttaaaaaaattatcaattaaaataattaccataataaaataattttataataaaattgaagatattgtggaaaagtaattaatattttgttaatttattgaaatgacatataatatgatccatacgaaatattaaattacttaattttaacataacctatatatctagattctagactcaattttactcgtataattaactaatttaatcatgaactttttttttatattttaaattacaagctttgaaactttttccaccgggaacatgctaaacttataaaaaaaaaaattaaattgcattatgaacatgccaaaattcacttagaaagttgtgtgccttgaggttgaagctctaggtcatgctacgtttcttatttcaactgtttcgtaattcgtagcatgtggtcttggggtaacgtatatagtagacaacttgcagtgttagcagccaaaaagggtaatgggtgattttttctttcaagggctaattaagcagaattcagaaatgatgggttctgcataaaaacatgtgctttgaatttaaaaaatgataattcgtcaatgacgtgaaatatgaagaaaaaaaatattgcttagttttggggtactcattagttttgtttttattcaaagttgaccttgaaatttataatcatcccattattcaaatatgtgcaaaatgtctgggtgtaaaaacgcctctctcttttcgtattcagaaaagataattgcacttcataaaataaattgcaatagggaatcatcataattatggtgatggagggataatgagtggaaaataagattaaaaaaaatatacataaagattcgtgaagtttgagaaatttaaaatatataaactatgtttatgatactatggtattaaattaaagattttattacaagtattaaaaaataggctaaactataattttttatcttcttattttctcaaatacgtgtgtttttaatccttccatattttaattgaaatattttattttttatttttaaaaatttatgattttacttcctcatttattaattaaaacattttgtcctcaattttaaaaatttcgtaatgttgatctattttataaatattgattgacatatatttatttattaactacatgttgaatattattttaattatttaattgttaataagtttaatttattaaaaagaattaaaaaatacataaccaccaaacatgacattgataaaaagattaaaattataaatttttaaaaaataaaaaacaaaatatctaaattaataaataataagactaaaatcgtgaattttttaaaaataaatgataaaatgtttcaattaaaaaataataattaaatatctaaaaaaaattgaatgattaattcgtttaacaaaaaaaaaaaaaaaaaaacattgcatccaatttaggtcaacagcaaagaatatccttaattatcaccacggaaattgcagttttaaactgtttaactgaaccacaatgcacacgatagatttcttttatcttcatttgagtctatgaccattctcaaaccatcgaacaaaaataataatacttctcgatctctgcctcactaatataatatgatcatcctacaatagccatacctttaacctccctccaagaaagcaccaatatatataaataataggactctcaattatggttttgtgatctcagaaaaaaggcatagctagagatagagaatcatgggtaaccctaaacaaacacttgggagtttcgcagtggtaacactactctttgctggggttattttgctgtacaactggtcctcctctttctccaatgaattagtgttatccaagaaggaaccactatgcgagcaatcaaattctgtaagttaattcaatcacccatattctatgtaattttccatcaaaacaaatcatgtgtattattattatttttttaatcagaaactatgagtgtctcataactcatgagtattatattgttctttataatccggctgaaatttaatttcaattttatatataatcaaaagagtaatgttgcattaatcccatggatgattttttttagtatcaagcatataaatgggtttttttttttttttttttgcaataattttccatcattttaattttcctttaatttgtgcatgcattgtagaccaccaccaatgttgaagcatacggagatagccttgactatgctttggccaaagcctcaatgggaaacaaaacggtgataattgctgtagtaaacaaggcctatgtagagcaagatgtagagagtgacaccaccatgcttgatatatttcttggtagtttttggcttggagaaggaacaaggtctctcattgatcacctcctcatagttgtggttgatcaaacggcctatgatcgatgccactttttgaggttgaattgcttcagattagaaacggatggtgttggttttgaaggtgagaaaatatacatgtctcaagatttcatgaagatgatgtggagaagaactcaattcctcttggaagttctcaaacgtggctacaattttgtttttacggtacgtaattctcttcttttccaatttatgagtatctgatttttaacatagtatcaaagtcatgacaccctctatgaataatagtcatgttttttccactgtcactagagtcttttttcccatttcatatccaaattatcttctttacattcccaaatgtagatctccttttatcttctcatatcagtacctgcattcacttatatttttatcaaatccctaactttcttttttgatggtcgattctgattttgaaatacccaaccatctacctcctcattaacctttaccttctccggttcctctacaaattatgattattatcatcatgaactccatctttgtctcacataaccttctcgtcttcgatcccgacttgaatcccttcgcaccttattgcattgcctatcactcccttttcctttccattttctctcgccaaattacaaccttccttccctcgatgcaaccttcctacgtgaattgacgcaccgttgtgatgtctcaatgcactcgttctaaaatctccacaaacccgttttgaatcccttcccatatctcaattctccatgtacgtatttcatttgaaggtcattgatatcaagtcagttgcactattttgaatcattcacagaccaaccctggagtctattgatttgaacatgtgattattttgaatctcttcccgtatcttaattctctttctacctcacataactgaagtatcctgtttctagaagattgtttgaagaagttattcttatctaaactattttaacaacttgtttctatctaaggtaaataataattcaaattcaaattatatcttcaacattttacttttgtttttattgatcggtctttctcatgtttaagtgcatagaattgaaatagtggtctaaaactagcttgcattcttaatttgttttcttctctagtttaagtcaattttttttctggtgaagcctagtttaagtcaaatactacaccttaattatgtgccaaaaaaaatactaccttaatataaatttaaagggagacgtaccatcgaagatcattagaaatagaataacatttatttgctaaaccccatgtcaatatttggttgtttttgcattaattatttagctaattcatccattaagcaaggtttgatttgttaacgaataagtcgatacacgatacaccttttggtataaagttttggtgcaagctaagtaacattctcataaatgtgctgaaaagagaatttattgtactcatattgagaaactgacttagttacgcactttcagctttgagtaatatgttcgtagtttctctttgttatccagatttacagatatgcgattatctatctgatctggtagagtggtaaagagataagaatcaattaggataattatttatcgtcatataatgaaattaattctagctaaatgaaaagataaggatgatattgattttttaaaaaataattacaaaatatttaatattttttagataattattataatgattaaggattaggagtgtttatcagcttgctaattttcaaaactaggtttaaatgtacaatgtcaatggagttgggttttagatatccaaagtgtttaattttataattaccaaaataaaatcatttttataacaaaattgtagatatttttgaaaattaattaatattttgttaatttattgaaatgacatataatatgacccataggaaatatgaaattacgaatttcaaaataacctatctagtttctagactgaaatttacttgtataactaactaatttaatcatgcactattttttaaaaattacaagctttgaaactttttccatcgtgaacatgccaaacttcacttagaaagttgtgtgccttgaggtcatgctacgtttcttatttcaattatttcgtaattcgtagcatgtggtcttggggtaacgtatatagtagacaacatgcagagtgttaccagccaagaagggtaatgggtgtattttgtccttcaagggctaatcaagcagaattcagaaatgatggccagaaaatgagataggttctgcataaaaacatgtgctttgaatttaaaaaatgataattagtcaatgacgtgaaatatgaagaaaaaaaatattgcttagttttggggtactaaccatgagttttgtttttattcaaaattgaccttgaaatttataatcatcccattattcaaatatatgcaaaatgtctaggcgtaaaaacgtctctctcttttcgtattcagaaaagataattgcacttcataaaaaaattgcaatagggaatcataattatggtgatggagggataatgagtggaaaataacaaagattaaaaaaaatatacataaagattcgtgaagttttagaaatttaaaatatataaactatgtttatgatactattgtattaaattaaagattttattacaagtattaaaaagaaggctaaactataattttttatcttcttatattctcaaatacatgctttttcgtccttccattttttaattgaaatattttatttcttacttttaaaattttatgattttagttcctcattaattaatcgaaacattttgtcctcaattttaatgttggtctattctagctataaacattaattgacatatgtttatttattaactacatgatgaatatttttttaattatttaattgctaataaatttaatttattaaaaagaattaaaaaatacataaccaacaagtatgacattgaccaagaaaattaaaattaaaatttttaaaaaaagtgaaagatgaaatgtttaaattaaaaaataaaaagattaaaatcgtaaatttttaaaaataaataataaaatatctcaattaaaaaatttaaaagattaaaatcacaatatgagtaattcttgtatggtaaggagaccttaatttctttcttttaattttcttaacttcgtcatataaagagacgttccctattgcatgtcaatgctccttcttctccattgacatattgtattaattttgtggtagacctaaactttgtttggtgacactcatactaaaatcagcaaaatgaattagacataaagacaaaacgtaaaaaaagaataaaaacgcacgaactatatagcaaaaaattataacaaaattaatttagtaacaaaccagatatttgatatctttttctttgaatgagatctcaattccagcatgatttcattattttacacttacatatactttctttccaaattttactttatataagattcaaacttaaaatctatattttcatcctgtacataatattcattgtgaatttgtattttctactattccggattaacatgatatggttatgttggagagagagaaagacacaatttttatcaaataacacatacaacacattatgattgattgtaagtctcattaagcactcattatatatatctttcataagatttataaacaagaaagggtcctaaatccttaaatttccttttaattgtaactgcaccaaatatatgttaataatgaaacaaaaaatattgttgcactaattttactccaagttctcatataaaataaccaaatagttgaatgaaaaaatatatcaatttcactttttcaactttttcatttctctaattcatatgcaacatcttttaaatttcacaggacactgatgtaatgtggctaagaaatccatttataagattgagcaagaatgagacagaagacttccaaattagtacagacttgtatcttggtgatccttggtcaaaaaaacatctgatcaacactggattttactttgttaggtcaaacaataagaccatctctttatttgaaacatggtatggtcaaaaggacaatgcgacaggaaaaaaagaacaagatgtgcttcttgacctcattagaagtggcatagttgaacacctaggacttagggtgaggtttttggacaccctttattttagtggattttgccaagatagtaaggattttagggcagtcgccataatccatgccaattgttgtaggagcatcactgcaaaggtggcagatatgaagttggccctacgtgattggaagaaatttaaaaggttggatgccaactccacagtaaatcccaaatggactaagcacaattggtgttggcaatcttggggaagacctatcgaaacaaacatctaagcatcatatcgatcgagttgaatgatatattatccaacatgacccacattttttttatgtacgtagtctaaatgggcatttgctttaacattgaaaagtgaacatttgagctttttattttttgtgtgtgtgcactactgtgaagagattaataaatgaatagtaaaatatttatgttgatgtgttgtgagaattatactttttttgcaaataaaattgattttaattgctaaaaatgattcataaactcttttcaaatagggctttggtttaagctggttctggctgggttggcattggtaggatgcggatcctctcctgcagcatcgttgtttaaaaaatgcttctttctttaagtgcgatggatgaattttcctatcatcttaaacttaccgttgattttaaatgtcctattataaaatcctttttttttttataaatatactatatattttaaaattattataatgggaaaatttacattttataaataatatattaaattgaataaaaataataattactaaaatattttttaattttaataaataaagaaaacatataattaagaaattattaatatgaaacgtaatattcattatttaattggatttaattttaaatacaataatagtgtgagagttatactaatctcccatcataaattgttatttgtgacaacttattgaatttttaataattattttaaaattcatgccacgataattttaagtggttgataattatatcaaaaaattaattttttcaatatgttagaaaaataatgaataccttaaatttagaaaatttagaaaaataatgaataccttaatatatcaaaagattatttagaaaatttaccttaaattttatttttttatttaaaaaatattgctctcttttacactttttgtatatatattaaaaataaataagagaggaaaaataaaaaagagttaaaaataaattatttagacaaataaaataaaataatttgaaaaatgccttcttttatttacataaaattttaaaaggtaaaaataataaattatattaatttaattttagtacttttacacataaaatacaattttcctattgtaatacattaaaatatttaaaatataaatatacattttttagattttaaaaataattcatttatatttttaatatgataatgaaaatcaatggttagtataagatattaaaaaagtcgattcaaacaatacacaacaaagcacaaaataacaccccaaacatttactttgaaatgagcttataagagagaaactttaatcatgagattcatccaatagactgtaatgatgcaggagagagctggagaggatctccgcatccggcattggtgggttcattttaaatttttaatgcttattatagttttatactttgctttgatatgttttcaaatagagtatatttattaaatttaataaatataatatatattttagtacattaaaaattttattatttttcaacattttaaggaattctttgataaaacttattctaaaatagaagaatcgaaagatataataatataatatgtacatatataaatattgaattaattatgtttttgtttcttttttttttttttaagattcctacttttagttcccgtaagaaatactttcatgggtcatagtccattaaaaacttttgatctatgttttgggtctttgttaacttggattgttaagtgataaggtgatatttatattgatattttggttcttttgtaatttagtattttttatgtattttgtgaataattttattttaattttacaaaatatatttgttttgtttttcattccttttatataacactttgaataataataaaaactttgaacatcgaaaaaaatattatttaaaacacttaagttttcaaatgttatcaaaaacacttaaggataaaaaaataaaataaacacattttacaatgactaaaatgaaaaatatatttgtaagaatgaaaaaaaatgataaatcacacagataaaaaatatattttagcttaattataattcatttaaaataaaagtttttcccttcttatcttacattaaattttcaaacttttcccgtctctccttttttatcatcattaaaattttaatttatctctcatctcttctctaaagtaaacctaagaccatgtttgataaattagctaaaagttgaaaaaatagataataattgaaaattggaaattgatagttgaaagttgaaaaattaacttgttaaattataaatattcggtaaacctaactgttctagtagctgaaaagtgtaaaatgactgaaaagtaataaaatcatgatttatttaaaaaagataatcagaaaattgaataaatatatttaggataaaaaatgttatttcaagtaacatttttaaaaaaaagtagaaactactaaaaacacttgtttgcataatagttaaacaaatttttttgctagtaaaaaagttaaaaattaattgaaatgatttgtcgaacatagcttaaataatttaaaaaaatgaaatctaagttagacaattgttgagaaattggttcagatttatttaaataataataataattcttttacttacataaatgtgaaatatcaaccatttttataaaggaaaatcacgtgaattggagcatttttttcttcgaatttttatttggtatatataatatatccacgataggggaaattataatagaaatatatctatcaataaaaaaatataaatatagaaattattaattaaaaatgttttcacaataactatttgagtgtagaaaataatataataaaaatattagttaattaaagttataaaaaaagacctttttaaagttacgtttatttttttaacttaattataattattatagtatcctttaattagtttgactaaaacaaattagcttgttttattttcatatttttcaagttaaatgataaagtatgataatatttttaaagtaaattttgagaaataaaagattcaatgatttttagtctattttgttttgtgtgcaaatggtctgacaatctagtcaaagtagtttttattttagttaggttttgaccatccttaagaatatatatatatatatatatatatatatatatatatataataactaaaccatgtagttaactacatgttggttgcctctcaatatatatagggttctcaattttgattttctgtcctcacaaattaaacgtcatagagatagagaatcatggatatacctaaaataacacatggttgtttggtgatggtaatattaccctttgctgggattattttggtgtaccagacctcttccttctccaacgaattcgttctaactctaaaggaaccactttgcaagcaatcaaaatttgtgagttcaaatcacccatattttacattttgcatcaaaacaaaatcatgggaaatctttatatataatatagtttaaattttcaatccttatatatatatatatatatctaatcaaaagagaaataatgttgcatcatgataggaaagagatcataaaccaacggcagacaagaggcacgacaagcaagaatggaaggctcaaaaggaagatcactccaccaaaatatctagaagattatgtgtagtggtttaaccaattctattagaaggatgctctattgacactatagtattggctagctcaaattataggaatatcttgtctatcatttatattctatcatttttctattattttgaattatgtcactgcaacatcttgtatgctatataagtatggttcatgtattgagtattgcaagcaagaaaaataaaatatctcttttcttacccttttgtcttgggagttttctagtcctcgaattctaggattccatcactatatacataaacattttggtgctttcattgaactctatggttgggtctcctcgttccaagtctaatatagaccacatcgaagaggccatagcgaaactcacatccaatcaactcaccctcatagccactcaaaacagcatgaccatcaaaattgatgaacttcttcagaaaatggctcatctcgaaaccagtcaacattctcctactttaggcgctttagctttccaccaccaaccagatccctaaccaaatatgcagccacaaacagacacatatcgatggtcaccaatggcttccaaggtagtggggcaacaaccaacagagaagaagctgacatcgacaattgctctgaaggtgaaatcgttgtcactgacagtgatcgctccgatgcaaaagacattggccgcaatgcacacttcgatgaagacacaattacagtcagcgcaagagctcttgtcagaggagtgccgaaatcaccataatcgttgtcttcttcggcacatgcttccacgtcgtcatagtcatcttccgcaacctcgtttgcaacacacctattcatgttgttgccgattttcacaaggtcatccacaacgtcatcgaggaagatttcacaaaggtcgttgtcttcatggaggacacgcttcctatcactgcacttcctatgtgagcatgtagcctaacagagcccaagctctagagggctacccttcccatcctaaatttctttagttgtttgattttttttgtcctcccacacaatgttcttcatcttattggaagccaccttgaagccatggtttgaagtccctctacaaccttgaagacaagtggtgcttactgtgggaaagttaactatcaccttgaggacaaagtgtttttagatggcgttggggatgataggaaatggatcatgaaccaacaacagaccacaggccacaagcacgacatgcaagaatggaaggcccaaaaggaagatcactccaccaaaatatctagaagactatgtctagtggtctaaccaattctgttaggagggtgttgtgttgacactatagtattggctagctcagattataggaatatcatgtttgccatctatattaattttgtcgtttttctgttattttgaattttgtcactgcagcatcttgtatgctatataagtatggttcatgaactgagtattgaaagcaagaaaaataaaatatctcttttcttacccatttgtcttgggaggtttctagtcctcgaattctagaattctatcactatatacaaaatacattgccatagattacttttattttatttttatcaagtatatttaaagagtttttttttttctttttagctataatttttcatcattttaagtttcctctaatttgtgcatacattatagaccactcccaatattgaagcaaatggagatgaccttgacactgctctggccaaatcctccatgggaaacagtggtcattgctatagtaaataaggcctatgttgatctagatgtagagtgacaccactatgcttgatatatttcttggtagtttttggcttggagagggaacaaggtctctcattgatcaccttctcttggtagcgggtaatcaaacagcctatgattgatgtcaatttctgaagttgaattgcttcaaattgaaaacagacggggttgattttaaaggtgagaaaatatccatgtctcaagatttcatcaagatgatgtagactttcttccttttagaggttctcaaacgtggctataattttatttttcacggtacgtaattcccttttccccatcttttttctatttttttacgattgattgctctttctcatgtttaatatgtgcatatataggatgtctcagtgatctaatctaaacttaatttacttttctctctcttctcttttttgaatctatatttcacatataacttttttttttttttacagataatatttcacacataacatgccaactaactaacaaacttctctcaactatatcaagctatcattttttttatatctttgtacctatatatgatatgatatgatgttccttctctctctctctctctctctctctctctcacacacacacacacacatatatatatatatatatatatatatatatatcatatttgatctttatctataaataaaatctaaaaaaaaaataaaaaaataatttctaattgtgaaaacaaaatttatatgacagtttaaattattcattataaatcttaaatatactctatatttaaagtacatactataaatttatatatgatttatatattatttattaaaaatttaattatataaaaataaaaagtttatcctataaaatatacaaaataaagtaccaaataagaaaaaataataatattaacgagatttggggtaaaagaaatagattaatctcacaaaattataaacctcaacttgaatcagtagttggattgacaaccaacctcaattaaataaaaaataatataaaatacggtgtatttgatctaaactttgatatataaaatttattaaaattaaaactagttgaaggatttttttttaaaaatggctataatgtcaaatttttaataaaataactcaatttcaaacctttttcttagaaaatgaataaggatacacttttctttatttggttcaaaagaaaatgaaaaaggaagttaattttcaaaaatttaaacttttatttcttttatagtttttcttcaattcaaatttcaaatatattctcccttcctcatattcttttcattttactaaacaaggatcaatctaaacgtattaagaagaaaatgtgtttttttttttacaaacaagtacaaaatgtgttgaatttattaaaaaaactataaaaaaacgagtcaaacattggcaaaaaaatttaattattgcaatttaaataaaaatttacgaatttattgtagtttgaaaactaaatacgaatctataacaaccaaacacacccaggccagatgtgttgaaacacgccctagccaggcgtgactggcctccaatcccgccccacccaggcatgaccaaacacgcccccaccaggcgtgacccagcacccagtcacgccctatccaggtgtgacccagcacccagtcacgccccatctaggcgtaaccctgcaccctgctcccttcagccatttcccctatttaaaccctatttaaaccctattcctcttacactcttcacaactcttcttcatcatctttattcatcatctttgcagtgaccatatttatattttcgtttgtagttgttggtcatatatataaaaatgtttgcagatgatgattttgttcgtattgtcatatattataatggtatcaaaattgagggccaacgtggtgttgttttcgaaggtgataaaaggccaacacgtatcaaacgcaactcaaccattgacaaattgcatcaaaaaatcaatcaaaagttagttctcaaaggtaatcaatctatcactatggttactgcaagaatatggtgcgatgataaatatattagcatgaaagtaatagacgacgaagacgtagaatttgtaataggagaattcttcaaccaatcaaggaaaaatttcttaaagttgtacgtggattgtgctaaagcagaggatgtggctttaccaatgaggaggtcagttgatttcaattattctcgtaatgcatcagcatctgctgctccagttgttaattggtcaatggaagatgaaaatgaccctacttgggttatggatgacgatattgacgatgacggtgatcaaaatatcgaaatggaagatcgtcttcttgctgagaatgctagtgcttcggacaatgatgatgatgatggtcgaagcgcaactcaaatacaagtacattactcagcggtgggggagtctgaaatccaaccacaagaggatgcaagggagtctcaattaccacaacaatgtcaaggtgtgctaccaaacaataactacttacatatatgtctggtttttgtttatgtatttttttgtaataaaaatgggatattgcacatgtaggcgagggtaataaaactttttgggatggaatcccacattactcatacattggttgggattatccgagtgaacaagattctggcactggttcaagttcagttgagggtccatggatattagggaataagttgtttgtgaaacaggaatttgcatcaaaacaagatgtgcaaatggaaattaagcaaaacctcatgaaggagcatcaggaagctgttgtggttaaaagtacgccgacaaagttaagcatgaaatatcgtgcgcatgaccagaattgtccgtggagggttagggtaatgaaaccaacgtacggtgaaagatgggtggttaccaaatggggtggcaaccacaattgcttaaatgatcacatttctcaggaccacaaacaacttgatgctaatgttattgtttcacttgtactaggtacgttattggatgagatgataatgatgagaattaatgattttattattattattattaatgataacgtgaacattttttattattagggatgataaagcatgatctatcatgttcaattggactagtccaggagaggataattcattcctatggatacaaagtttcatatagaaaggcatggtatgcaaagcagaaagcaatggcaattatctacggtgattgggaggaatcatacgcatttttgtcgaggtggtgtgactatatgcttcgtttttcacttggttctgtttatcatcttcaaacaaaaaattataatgtggctcatagaatcgttcatggaaaatgcgtgtttcaccgcatattttagaccttcagacaatgttgtgaggctttcaatttttgtaagtcggttattcaaattgatggcactcatttatatggcaagtaaaaaggaaaattgttggttgccacaggtaataatgagtgtctgccacttgcatttgctattgttgaggggtgagacgttggaagcttgggaatactttctggataacattcgcgtgcatgttacaaagaagacaaatatttgtcttatttctgatcggcaccgaagcatattaattgagaggcaccgtgggtggcaaccaccgcatgcttatcatgtcttttgccttcgtcatattgcgagcaattttaatcaaaagttcagaaatgaaaatttgaagagagtggttatgaatttaggtatgttaataacttcatctattaattttgcatgtataactaaattttaatgttatttaatttatgtgcaggttatactccttctattgttgattttgagatagccttcgcacgttttcgtgatgtgagtcattaggttgcaaactggattgataacatccccaaggaaaagtggacacggatatatgatgttgagggatgaagatatggacatatgacgacaaatttggcctagtcagtaaacagggttttaaagggtgcaagaaacatgccaatatgcgcattggttaaacacacatatagcagattagtggagtactttgtaagcatggggcaatcggctcttaatgaattacaaggtccttatcctcattgcaaaaatgtggttgctatgttaaaggccaacgagaccaatgttactgctcattatgtccgtacatataatgttgaacaatctgtatttgaggttgacgatggttatgacaaatcgtattcggcaaacctccctgagcgattctgttagtgtgggaaatttaaggcgttcaagtatccttgtagtcatgccgcagcagccgctttacatgttcgtcaggcaccgacacaatatgtggataacgtatttcttataacaaacctggtacaagcttactcatttccatggcagccaattggtaatgagcaagcaattccacctagtgaagatccagtggtcatacgtgacaggtctatgttacgtgcaaaggttcgtccaaagtctactagaatacgtaatgagatggatgaagttgaagctagtcaaagtcatattaggtgtggtatatgcatattacctggttataaccgtcgaaattgtcctaatcgtccatctacctcatgatttctttatgttgttgtcaatgttttctttatgttgttatatttcataataaacgtttgaaaataaaccaaacttccagtgaaaccactcatctcagttatattatacgctacgatgaatttaaaacatgaaaacaagaaaaaacagtaacaattacatagagaaacataatcatggaaacctaataaaataacagaacatataaacaatcgaaattagagagacaaacacaaaaagctgaacatttaaaaacaaaaacaacgaaatgtactaacaacaagaattgaaacatgagaattaggaaactaatcacaatttggaagacgttgtgcagcggacatgtcatcttccagtagttggatttctggtttgttaaaaatagctaaaatttctattggagagaaacgcttccagtaattagattctgctaacaccttcaatacatcttcatcgttttttagttgtattatttcatattcgactaagttttctgaatattttgcatggcctggttgtcgtaagaacaattgtctgactacctgtgattcgtgaattccattagggggaactcctagcggcgcaacttgcttgattatatccttcagtgtttcgatattgcatcgggaagaaatttgaaatcttattggatttgttctagtaaaggagtaacccaaaaaattgtcttgtcgtggtatgttccacttgccgttgtaatacaacattgcatcatgagtaggagtggtggtggatcgaagtaggttgagtataccatcaagtgttatgctgatgatacataataattctataggaccaacacacgggagtttttcatggcacatcaacattgtgcaaacatcatcatcattttttagttgcagagaatggaaaaaaaattgctgacctgtattgatggatggttgtcgatagtaaatttcatgcacagattggtcattggtgagctgaagggtgttgtgcaatctactcttgagtgactgaaaagaacactcatcaggaactcgcattgatattggagtaggacattgaaaagaaataccagtttggttgtgtatgattgatccattcggaaaaatgaatgctaatttggaattagcaatggtttgagagcttatttcacctaagaatgtcatactattgagattgaatttcgtttgccgaggtatgtagtatgggagggtgtggttgtgttaacggggtatatataagggtgcaaagtcccgcctgggtggagcgtgaccaattgcacttgaatggggtgtgactcaggtcctgtcgttatagtgttgtcaatgtcattttaaagttccacatggtgtagcaggcatgcgtcctgtcaaatttatcttgttacatttcataactttatgcttttgaggtgtacttttttgttatttgttgctttatgtttaaacatagtccatagcaaatgatatatttcataacctaacgacgtccaagacaaattgaaccgagaagacaataacacctcgtatagttgcatgtacctcttatgtgaatacttcatcaattaactcttataatgttaattattctattatgtattgactatgttttcatctgtactaccaagtaacaagtaactggtttattttatttgatccaagagggcgttatgagtttttaagaaccattttatgaagttattttctttaaagctgattagtatatgaatgatatgaactattgagtcatatccctaatcgtcatgtgtttttgatctttttccttttgtagcttgaaaataaaccaacctttatgtgaaaccactcatgtcagttaatttatacgatgaaattaaaacattaaaaaaaccaaaaattgtttaacaattacatagctaaacataatcatgaaaaccaaataaaaataacaaaatataaagtctatgaagctggaggccactgctgatgatgcgcctaacaatctggcaatctgcgtctatcatgtctacgcgaatactgtggagcaagagaaggttgttgcacatgatatggaggtggagtgtcctcgatcgggagctctggacgatagtctgactggtgtggtgaaaaatctatttggctatacatttcctcaatagttgcatcatctcactcctgaggtgcctgactactgctccttgcctgatcaccgcatggcatcgctattggactgacatgatacgcaggctggctttgtgtgtccatcgacggggcatctggctgataatatgtatgagcctctgcttgcgtaggatcgtaatatgtttgatgaacaccgtattcatgacctatgaagggtggcctaatccatccacttgtgcatggcatgggtgcatggataggcttaggaactggtggaataggtcgtcgatgatgtcctaaccctcgaccctctttcgcacgacgcccattgtcgatggataaccatggctcctccagaagctgggtcagcggtgcctctggacctgcctcctccaccctagcggactctctgaaaacatcaattaggcaacccacctcctcgtgtacataatccaaaccgtggatctcaaattgctcagccgtcgtgacaaaatacaaattctccagaccatcaacctataactcacagcagatttacataaacaaaaatataacataatggtaaaaaaatgatttggagtaaataacttttggtcacatatcgtttgctggaaagtctataccaaaccatgtactcatggttcggtgacataagaccatgtattgtaggaggcacttcaacatgttcacctctcctattccatctctgtataaattttcttagcttacgagatcaattttcttgggcttcaccccgaagggtataatcatgcacaccttacaattttccagccctgtgaggtgttggttgatcccgcccaaattgcctcatgcatctatcaggttgggaatactcagcaatgtgaaaacaaatgattggtatcctagacatccataaatgctgtgtgtcaggagataaacccaaaaaatcgtaatctccataaggttgccaaaccacctacacaattaaatcatatataggagtcaattgcatattcacatccattttaaataaatatatttcattaaaaaagcataccttatctctagttaaggtgtctagtctgtctcgataccaattcagtgagttcatgctgaagcgacctagagcattaaatctaatattccatattcaacattcaattgttaattgcagtacacataaatacacggccattcaagtaatacaaaataaacatacctgtgtccgaagtggcggtctggctcatatggatcgggcaatgggggccaattggtggaaatctgagccacgcccaaatctgaagcaaaatagtgcaaccaccaatgtcttttctatcagggtctatgcattcgcacaactgtctaaacaagtttgccagaaccgcaaacccccagctatatgtaccaatatcgaaaaaatcaccaccaagtaaggtgatgtagcgacatcctactacgctccccccccccccgatctgtcgcaaaggatccaagatcctaacattcgtgcaatgtgagccttcgtgaagtatatcacattatgagggttaccagcaactgcatcccatgaaggatacactctgtcaaaatatgataacttcaagctgccggtgattaactcagtggtcgcatcagggccgttaccaaaaacctgattacacaattctgcccaatctgtgtaagtctatccggtaacgacttgcttatcagtaggcaatcctagaattatgccaacaattatatatatatatatatatatgtgccaacaattatgaaaaatgtattttcaacttctcttcctaaagcagtaaagaacaaacttttcttcctaaaacaagttcaacttctcatataaaattaaatagaatagttgaatatgaaagtatataatcaatttaattaactttacaacatttatcccctctaattcacatgcaacatattttttataggacactaatgtaatgtggttgagaaacccatttacaaggttgagtaagaatgagacaaaagaccttcaaatcagcacagatgcataccttgattatccttggttagaaaaacatcaaatcaattgtttgaaacatggccatcatttagctattgtaattcttttcttgatagcaggtcacatgtatagaacttctcggggattttcataaccctgctgtgcaaaaattggatatgcatttgaaatgggtgctcgaattattatatataaggcattcctggtcctttatagcgaatatggtatggccaaaaggaaaaaaagagcaagatgtttttttacctcattaaaagtggtataattaaagacttgggacttagggataggtttttaaacaccctttgtttcagtggattttgccaagatagcaaagattttagggaagtcatcacagtccatgccagctgttgtaggagcattactgcaaaggaggtcgatttaaaggtagttctccatgattggaagcaatttaggaggttggaggctaattctacgataaatactagttggactatgcacaatcaatgtcgacaatcttggggaagaccttaaaaagtaaagggttaagcatcatacttcatacttatgtaattgaatcatgacatccaacacgattcacatccttttttatatatgtaatctttttttatttgtaggaataaaaaatattattagatagtttacaataacccacgcaccattatatatataatttaaacaaacatttgttttaatttagaaaagtaaacatttgagttatttttctttgtgcactaaatatgaagagagaaattttaatgcatgttctttttttggtagaaattgaagacatgtgataactcaagtatcctacttaatcaattgacttagactctttgataaaaaaatatttatgttcttgcatgtgttttaaaaatatacatatgcaagtaaaattactcacatatttaaggtctgttcgggtggattttctattttcaatcttaaaattattaaaaactaaattcagtttatgttttgagttttcaatttcagtttattttattttttaatttttaaaaagttgttgtaaattaataatagataaaataagtcaaattttatctcgctccattatgagattatgttatataaaaaaatattggcacaaaaataattaaatattctaaaaataataaaaaattctaaaaaaatgttaaaactaaaaaaataacaaataatgacacacacacacacacatacatacacacacacacacacacacatatatatatatatatatatatagtttgcatatatatatatatataaatagttttctagttttttttacatatatatagtttgcattatgtaacaatatatgtattttatattcttttttagttgttatgtatatttcttattattatactatttagaaattttgttattaatttattatatcacatattatgttttattgaattattattaatattattagtattagtatttaattgtatgttatgtttcttcagaaaaaaattatgttatgttttacttatataaaaaaaaaaaagctattggactcaaatcgaggcccaaaaaatcaaaacagataagaaagaaaaaaaacaccctgaaatgaaactgttaacatgcaccgccccgatggaagaggacgacaatgcgcatggatgcgtgaaaggtccagcgacggcgaagattgtagagccttgtccctagaagctgtggtaacctccataggaggagaaaatctgaacatctgcaagttcagtcctaatgtagtacgatcattaatgaaataatcagtagctccagagtcgaacaagactctcacatcataaacatcgatcagaatagtacctctgatcaagtcagaagctctggctgcctctttggcatccactgtgtatagatccggcctgcggtggttgctactgatatcactggagtggctaaagctcggccacctgcctgtggacactctctagcatagtggttgccacatctatagcatataagttgaccagtggggcacactccccaatgattcctcccacaagtatcacatttgggaggtggaaccagtctctgtagcgatcctctctgattgggacccttcttgaacctgtttgctggagaatgaactcttaaatctctgcccttgcccttccccgcagggcctggaccactgggtctcctcacctcctgtctcatggagggaataggctggctgtcactgcgcctcctgatcatatcctccatctggcgacactatcgcactaggctacctaaatctcgggatccactaccagcaatcttctcctcaattctctctctaagtcctctctggaacttagcagcaagaacctctgcatcaggtagagccctcctgaaatgcgcatacttagccaattcattgaacttggccaagtactcatccactgacatctgtccctggacaaggacttcaaactcggtctgcttttgctctcttgcatctcttggaaaatatctgtccaggaattgggcctcaaaagtctaccaagtgattgtctcaccctggcctctcaacaactgtgaagtggtccaggccccgccaggcaaaatatcaaattaacacggactagcccccgccaggaaaaatatcaaattaacaccacttctcaattactgtctcatgtgctttactcagaaactcaacatcaatcaagtgcagaactcaacttattactcatgtacaaaaacttaacatagcatccatgtacatcaattcatagaaacacatgaagttcatagagatttataaaacacttatcaacacataaacttcatagaaacactcaaaatatctttatttctttgaagcatttcatcaaacacatggtgtgcaagctttgttctccatagaaataaatgagattctataaatacttattcgaacaaaaacaatacttgaactatatttaacataagcttccctatacttattcaaacacaagtaatacttaaattatctttaccataaaacttccccatacataccttgtatcttccgataaagcttggcaacttcctcctaaaagcactagctcacacatgattttttcaaggtgtggggtcttttctttcttgttcttaagttttgaaaaatgaaaggatgaaagggatgtgggagagagggtattcttgtcatttccaaaatatcgaggggcatttatgtaatttccatcttaaaatatctcactaaaatatctagggtttttttgtaatttctgatttaaggaaagggtaatatggtcatttctcttcaaacatttccttaatgtctctaattgatatttcacccaattaattcaaatatagacagccaaatttctcataatcttatacttacatcaaaaataattcatataacgtatatttgcagttattgaaatttcagggtgttacactatataacccacccttatacaacttgatttttgcaaattgtatcacaacattttatcacccacattagagagatgatcattgatgatatcaacatagtccccaaacaacacataatgtatttcaccccaacaaaaagaaacgataaaataataatcaataaaataaaaatatataaatgtataaaatatcattacttgtcatcaagtaagtgtaattggatacatcttgtggtcttgccatctttcacataatcttttttagcagatatatcatccatgacacccatgacatctatacaaaaaaaaaaaacaataatataaaatcaataacaagatcaaatgtattcaaatctattttctgaatgattcgaaacatgccaatgagatagtcacattgtccatttgtgtttgttatgtcacttaacaacataaggttaatagaattcataagtatgttaacatcttcacaatgtgtgattgatgtttttgcatggaacaacaacttgaagttgtgtaatatgtataaaccacatgatgcatatgtaattgtggagatgatggtggtttaggagaaaattacttacaaacgatgtgtcattttttaacgttgtttggagcacaataagtgtcattgtgggaatgcaaaagttagaggatttatgtgagttaaaaaaaatagagtctttgtataattcaagtaaaatatagggagtgacactataatttgctctcaataaaaaaaaaaaaaccaaaatatatatttcattcctgtaaaataccaaaagtttgtttttagtctttacaatttttttgttcgtttttcaccctcacaaaataaaaatgtgtgcctttttggtccaaagttaggtttggacaaatctaatgttagatacagggagagcatgaaggtggatcaagatacatgctgaagataaatgagtgttttagctttgtacatgttattcaattgaagacatctgtaattacttgatgtaattgcttgatgtaggagagaatcatcctatgatcctttgcattgcataaacattcatttacttgcattcatgattttacaaaagcacatggtttgtgaaaatgtttaagatttcatgattgcattaaagtaaagtgtccatgattttaactttttggaaaaactatttttcactgttttaatcgattaccacatattggaaatttattacctgagcttaaaagaacaaaataatcgattaccagcattaagtaatcgattactcagtataaacacagaacatgacttgactgcgttaatcgattaccatttatcagtaattgattacttagtttatttttggaaaaatgaatccctgtagtaattgattacaggtcgaaataatcgattactttgtttatataacctttccagaaaactgaagaacattttaattgattaaattttgttttcaatcgattacaaatgaagttttaatcaattacttagacgatttaatcgattacattcagttacaactgttttgttttataaatagctagtggattttttgaaacttacaagattacaactctatgaaatattcaaagttttcagaagccttctgagattgagaaagtttactctaagttctaaagtgtttgacccacaaattcaaatcttcatggtgttttgaaagattgtttgggcaagacaacaaagaagctttttggagaagaagttctgaaagtgtttttcatttcaatcctgtttggtaactcatattcattcataatcattaatcatcatgttgtctctctccattagctttccttgtaaatttatttttgtatttttggttgtttgtaagttttacaaagggttcttgaagctttttctagagtggatttctctagagggaagaatagagaatgattatctagttcttgatcactaggagtctaatagggttttagatttcagttctttatcaagggctgataaagggtgattgttgtaaagcttgtaaagaacaaattttgatttagtggaactctaaccaaggtttggtcggaagaaactggatgtaccttctcttgttgagaggtgaaccagtataagttcttgtattgatctctatcttttaatctcttcttgttatcttgatctgtgattcttggtgaattcttattactcaacaagttaagttcttgtaattgttttcttggactaagtggtttgattgattgtagcattcttggtttaagtgtgataaagattctttaactctgattttctaaagattttaaaaaggttaagtttaaaccaattcaccccctcttggttattgtgtgtattcaaattattttcaattattatcaagagcagtttcttgagtgttattcaagatcactatatttctttaaaagaaaatgaatactacacaaattactttcaaggaaggtacctcccttaatcgtcctccgacgtttgaaagagagcatttcaatttttggaaaaatagaatgcagattttcattcaatcaaatgacctaggtgcttggaattacaaaaaaaatataataaattggaagaatccgttttactcattgacatgaaaatgcaattttttatttaaaaaaagcaagaatacaattacaaaaaaattaaacaaaaaatgctagaattaaccataaccactgcacctcgaaccaaaacaaccaccacctccaacctcaaaccactcgaaccaccatcaccatcgcacctcgaaccaaacacaaccactacctctaaccccaaaatctaaaatccccaaccccaaaatcgaaacttgaatccaagagataagagacgctttgaaccatcacacatgtaagagaaagtagagcaccttcaaagcgagagatgggaatgtgaagcattgattgattttctagcgaaggctggttggagcgcgaagtggttttaatagagctctggcggggtcattgtcagaatcgtagttggtgttttgtagagagagaagagcatgaggcaaagtttgcagatccttaatgggttgaagacgatcttccatcaccggaccttcaccgatcttcaaagtttcctgatccctccattaatacactgaaaccacacccaattgctggaaaaaagggggggaagaagagggaaaaaaaggaacacacattttagaattcaacaataaaaaaagttaacaataatgacatggaaaaaacacacttgtaaagtaaaaaatgaacagataacttgacttgtagtataataaccctgagacctggcgcggatggcgcgggagtcagcgcggatagcgccagggttttgaagcagaaaaccctgtctgtgatgtggcgcgggtaacgccgggttggctcggtcagcgccatagcttttgggatgtggcgctagtggtgccaagctcacgcggtcagcgccacaagccttccagaaaaccaattctctctggaagttggcgcgatcggcgccattggtggcgcgagtcgcgcgggaagtgttctggaaagtgagttttctctggaagctcacgcggacagcgccaatgtggcgctggtagcgccatttgattttaggccagcgcggtcagcgccatgggtggcgcgcgtcgcgttacaagtggcctggaaaatcagttttctctggaatccggcgcggtcagcgccagatgcggcgcggttggcgccatggactttttaagtgtggcgcggttggcgcgggacgcggcgcgatccgcgcgggacgcctgacagagttggtataaaaagggaaatcgcgattttgaaggcaaaaatcactttcttcttccctaggacgtccctcctccattgttggagcttccaagcttcattcttgctccatagttcaccaaattaagtcctttaaacaccaatctccatggaaaacacctagtgagcttgaatctctcatccatttcccttgaaaaccccaaattagagaatccctttctcaagggaagttcttgaagcttgagttcggcgaggaacaacgacgattcgtgagtacccaagctaggggaagttgcttttgggccttccttgtcgtcgttgaggtaagaaactcaaatttcaccgtttaatttgttgattggggttttgggtgaatagtgacccacttgagatagagctagaattagccttgggtcctttagagatatgtgtttagaatgtgttgaggatgaaagattagctctcaaatgttagtttggtgaactttggtttattggctccatgtaaggcatgtgttgttattatgctgaatgggttggcttgtttgacatgctagagccttgatatatgtcttgttgtgcctgagaggccatgagaacggcaccttgtgtaggtgatgtgaaccgttcgagccctgtgtgtattctgaggaattgggttgttggggcgagcttagagctctgtgtgctttggctaggccaagctagacctgtgagggtctgagaatcacttgtgaagtgattgagtgtgtatcccacactgtggattatgcttcttgttgttctcacggcttaagaccgttgttgaagcattatatgtttgatgtgatgtaggacgtgagcctgagatctttggtggtggtagccacgagtccgggagaaccggtgctttgcttagagcaggtaagctcttggttcttgactgtatgtcctctgttgcgttctaccatgcaccaaattgggtgatggttctgttgtgggcatttgcatgtatatagaaattgtatgttgatatgcttgactgatgaatggtgatttgaaacccgtgatgggaattggtattgaaataatattgatctgagatttgctgagatgtgattggacccagtgattgggtatttgttatgaatggttgtgagatgttgaattatgttatgcttgtttgattatgagactgaaatatgaatcctatggtagtaggatagatgacgagagattgagtaagacctgatgtgagatgttcctgtgatatagatgtagcctcccgaatggagatgttcctatatccacagatgtagcctcctcaggcaattggctggtgtaggatgtgagatgtccctgtggtatagatgtagcctcctgaatggagatgttcctatacatagatgtagcctcactggatggagatgtgcccgttacatagatgtagcctcttgaccgagatgttcctatgtttcggatgaagcctccgatagatatgttgtgtcccgggtaagagatgttcctagtatatagatgtagcctccgtgagtggagatgttcctatataactagatgtagcctctgccgggtaatgtgctgtgtaccacctgtttgtagacgggttggggtgaaaccatagaaatggtatatgtgaaaggggatgagaccctgtgtgttctgatgatgaatgagaaatatcctgtgattgatgataacgtactatctctatgtatgtgcctgaaagtgaaccaggggaaggaaataccttcaagggccctgaatttactgagattttatatctcaccccttgtgtggggcttatgttttgcaggtgaatcctcgagaggagcagacagatcccaaggcaagaagcctatgcagggatagcgctggatagacaccttaggctagatgatatgagcttgtggctcagatgttttgtattagcctttggttttgattttgtgtaccttgaggggaaatcatgtatagttttgtacttaaacaggacacttgtatataatcaccatattataatgtaaagcatgtatgctcatggcatttgatgatgcccttttgttatattgcttccaaaactgctaatctctgatgtaatatgtgttaatggatgattatgcgtggtaattaccctgtagagggtaaggggtgttacatttggtggtatcagagcaaggcctctctaccagtacggtgtggttcgaggacgaaccaggcggaagctggtgggcatgtaacatcccgggcgctgacgagggcagggagtgatcgccggtgcagtgaggcacggacaaggagcggctcctggtaggcttccagtgggaggggtacatgaatgaatcgaatacacacccgaacgagagggatccagaggctgtgcaggtatgggactgtacagttgaggataacttaaaggatttaataggtactacctataccaacaaggtgcatctacttttcggtagcccataacataagaactccacagttaagcgtgcttgacttggagcaatcttgggatgggtgacctcctgggaagtttctcaggaagtgtgtgagtgaggacaaagcacactgaaaagtcttgtgttggtatgtagggacagtcgttgatcctgcaagtggtcgggcgttacatgtaggttcggccttgaccaagccttacttcaagccaaaagacaacattatgaattgtgaggaaacaaaaacatactttggatattttacagcaaaaaaccatattttaaccttaaagaaaaagtgttagacttctaacgtgggtataacggtgaaacccttctgaattctttttgtgggcttatccaagtaatgtagcccttaccataccctaattttctttcttcaaatagcgtgcgctcctcatttcaagtcttcgactttcctcctccgaccacctctacgaaaattcccgcggcggcgctccttgtcaccgcaacttctctctattgaagccctagagagagaaaattcataacctttattcccctgtcaagcttgtagcacagtcacagccgtgtatggcggtggtgagtatcaaaaccaattctccttctatttcttctgcttctgagatgtgagctcaattttctccttttggttgaacccacagatgaagtatcagctatagtaattgacttgggttcacacacttgtaaagatggttatgctggtgaagatgctcccaaggttgtgtttcccctgtaagtgttttctctactctttttacttttctgaagttttggatttgttgttgtgtttactgttttgctgatattgttttaccatttattagataaaacttatattgaaaaatatgtattcaatgaaggaagacacgatggccaaagtgaatcatgtgttgcttgtagttcgcatgctaaaaactaatatgtcaactaaactattcccagcctaccttgaaatgcatggttggacttgttatatatcattttattctttgactgacttgatgtcacctatagtgcttttaataatttattcttcagtatctaaaaattaattactaattttaccatgttttgctatttgcattcaatgtaatatatttctatttgaggatatgtgttttacttttcaataagtatttgtagttgaaccaaattattagataaaatagtgaaaatttactttcatgtgtaattttttagcaaattgtatttttaatatttcatctatttagattagttgataatgtcaaacaaatttacaagagattaaaaacataatttaccaaaaaagtaacacgtgattgtcccaccaaacttcttgatgatgtgacaagtcattgagttgctaatgtgaacttgatagtaatgactaaaacaattaacaaattaaaagaaaaaagtatatggaccaaaaatactaaaattttgtgtttaggagctaaaagtgaaatttgcaaaaattttaaaggtcaaaaacataattaactctattttttcttgtcctcactaagaaaaaattatggattcgtcactgctcaagtacccttgctcttaaggttcctttatctatatcttaaacaatcttcgttcactgtgttgtaggttgttcattacaaagccgccatctatgacataacatgaggttcgatgacattctctgcggagttggcaacgtggttgtccttgttggcgatggcaacaatggggctactatgcccaggcaattgcaaccatgcatttggatttaataatttgagatctagttgccaacaagattccaattttagattaaaaagtttggggtttttcgttgaggagcagcgagtgggctaaaatgattgtggtttgattagtaaatttggggttgtggctcaaaaaaggtaagagaaaaggggttcaaaaatttgtagtggattcttaacattttgtgaatgtttttaacccccaaaaattgtatttaaaaacttaaattacaaattttaagtttgaatttacctaaatctacattcagatcaaaattcacaaatttcaattttgtgactacaaaaaagtactaaaaattttgtagggacaaaattcgaatatttccaattttatgatgacgaaatgtaaataacattaatgacatattcataaaatatattatataaatttcaattttattttatagataaaaatatattttgaggtgttacaattttagcttttttaattaattttaaaccccttgtaatttcatttatagatgctttatttttattatatttttagtttcatttattttagttttttcatattatgtattctattatttatatatactatatctttaaatatttttaatcaagtttaaaataaagtaagaaacttacatttaagtagacatgataattttattatgctaattagaataatagttaaaataattagtctaacataaaataaaggtatcgactcaagggtaggcttgtggctcgtggattcactcaacccaaggtatcgactaccttgccactttttcaccaattttaaaggtaaacacaatttgactacttttggccattgttgcaacaaatcaatggtcattgcaacaacttgacatttataatgtattccttcatggaaatctcaatgtagatgtgtatatggaacttcccccgggcaccacttttattcaaccaaactaagtttgcaagcttaagaaaacactatatgttatatggtttgaaacaatcaagcagataatggtttactcgactcttttcctcttcaataaaccaatgattcactcaatctttctttgatcactcattattttttaaaactcataaccactctcttattgaattacttgtttacgtggatgatttgatccttgtaggaaacaaccaacaagaaattaatgacactaagcaatttcttaacaaacaattcagaattcgcgacctcaacaattgtaaatactttcttggatttgagattgctcggtcttatcaaggaatccacattttttcaatgaaaatatgcactgaaaatactttctagcatgggtcttctggcttccaaatctatcaacactcttatgataaaatatacaagcttcacaaagatgatgacaagctcctagatgataacctacaaatgtctaatagctagactcttatatcttaccaacactagacctgatctctgttattcaatttaacagttaagccaattcataagttgtaaaatcatctctcatcatcaagttgcaatcaaggtgctattagagatttttcgtgtggtcaagtgaaaccaagtttcgaggtagtgtttagaacttgcgtccaagttgtctcccaaaggactagtggttattcagacaattccaatcaaaagactaatgttttgaaaagtattttctcaatagtttctgtttgaataataaaataacaatgtgagaataaaaacaaataataataaaaagaataaaggaagaaacaattgcatcattgttgtgagaagggtggtttgaacaaccaagattgaacttagtatccccctttttcaatgtaacattatcaattaatctagttattcatgtaatttatctccaattcacagttatattctaaccataatgtcttatgcagaaaagtctaagtcctttagattaatttccaatattttggcaaattaatctaaatgaccaacattaatgtttaaaaatttaaaggagcctaattggtattgacctacgtctagaatcaatccccattaggtactcccttgaggtatagatacccctaacccttagccgcttgttcaaaagccagactaacaagtggagtgtctgtcgactaaacttattgattcctatgatcaagcaataggtgatcagtctagaacaaacattaagggaagaagaagaagaagaagaagaagaagaagaagaagaataaaactaaataaatgtattaacagaggagtatagcatgaaattaggttcattcattttcaaccccgacaaaagaggagattagttggtcatagcttgattacaaatcccataattaaacacacaaaagagtaatgaaatcaagatacaatccctaggaatggtgatttgtttcacataaaattgatgtctcaaacgtaagaaaatgtcatcttccttcgggcaccaagtttatataatctgatataggcttgggcctcacgcgttttcctcgcttaagcatgaataatgccttgtttaagtgaggcattcttatcttaaaaggcttgaatactgactcttctagcttaagtgcacaaaatattgtgcttaagcgatggattcgagttcctcctttggcttgactgcctcgcttaagcgccttgaggcttttgcttaagtaagggcctccaatggccctaaagctgcttactgacttagctcacttaagtgcatagcatgccatgcttaagtgagcttggcttcatcatcttcttctaagtttttctcgctcaagcgtcatcaaggaaggttcccttgaacgagtcatgttagtagctcttccgattgcttttgtcttagcttacttaagtgcgaacaagcaacacttaaatgagaataacttcatttgtaattctgacccaatttcctgcaaaaaatcacaaaaacatcaagaaattctaacaaattataactttagagatcctaagtgtgagttcctaatttatcatactttgagtaaatacaaggttcaatattgcgagttcctaatttatcatactttgagtaaatacaaggttcaatatataaaaaatgttggattattgtgtcgattcatgtgtgaaattaagataaaattgacgattatcaggtactttgctacatcaaaaccacccctgcccttggtctattccattctattgattcttaacttcaacttaaagccttctcggattcagactgggcaagttgacactagaaaatccataaccagatagtatttttattggtgaatctttaatatcttatcgttccaaaaagtaatctattgtctcacggtcctctattgaagttgaatactgcacactagcttccaccacttgtgaaattcaatggctcacctacattctcagagaactacaacttcctttcatttcattagctctcctttattattacaacaagtcacctacctataccaaaaccaaccctaccttccatgcgccaaacacatcgacattgattgtcatattgtttgtgagaagctttaaatgaaaatcttccaccttctctactatatctaccaaagaccatcttgcaaatatcttcatcaagccccttaatttcaaaccttttcacaatctgttgtccaagctaaaagtgtacactatccactcttcagcttttggggtaaaggaataatcactgaaagttagtgtaatggaacaaataacgggaatataattatctttgtttttctgttttttgttaggatagttttgttaggactcttatcccttagtttcacctttcctttcctttgggctctatacctatatattgagacccttacttgtatcatttcagatttcaatctcaattcaattttatctctcgagctctgataataacaagttacaaatgttagatctttatatgacatctcttcattcattgttaataacagtgccgagtctattaataatgacaataccactttaaatttgagtacccgaccaagtcagagtctattccaaacaaatagaagaaaagtggttaataacacaagtaacatgtgtgttaatctcatgactaaatttatgaacacaagatctaggagtaatgtggatactggagttgctgaaaatattcataattagcaaagacatccaattgccaatgaaaatatttccaattgtggaattatacatcatttgaaagcaaccacgcatgtaattagacgaagtcaacttgtaacaccataagtgtctacaattcatgataacaattatgaagatgatcttaaaggtaagatttattatgatgatgtaaatactgttttaatttcttatcaagaattttaaataatgcaaatcttattgtactaatcatttaaatgttatgtttcacaacaaatgatgattcaaattcttatcaagataatttatactcattctggtctcaaatataagaaaaaaatatgtcacactaactaagaaagttagttaaccatttttaattgcattaatttcaattaaaataattttttctcaacttatcattcattggaacttagtatgaaggataagaaaaagtcattaaaactagcacctcaattaactgaagtgtattttagagatagtaacattaaataaaattaagttagttgatttttttttatatatatttgagaccagaggcaatgtgaaactaacagttctcatcatataaaaattatgatacatgtactttatttaaacttatcaatgatataacccctaattaatcatgtatgcttatagaatgcttcaaatttcatatgataccttgatattgaagatcttgcctatctttgtcaatattgtggagcttatgtgatatgaagaaaggatgagaaaaaaacaaacacttcaaattttaaaaaaaattctttgttttgttgttgaaaagattcaactaccacttctgcaagcaaccaccaaatcctcttcagcatcttctaattgataaagattcaagtgataacaagaatttcaagaagcataccagttcttataatatgatgtttgtgatacatcatcgagagaaaaattggacaaagcattcaataatggtagaggaccaccttctattagaatctaaggccaatcatatcacctaattggtaatttgttgtctatgtcagggcaaactccaaagtttgctcaactttatctttatgatacagaaaatgaaattcaaaatagaatgggggaggaggcaaacctaattgacttttatgcctatttgtttactaacattttattacaattctttacttacattcaattcatgttctttaatactccaaatatcactttctaagttttaacttctctaattttatcaataggtctaaaagttatattgattcagaaatttccaccaaattgaagatgatgcttgatgaacacaatgtatttgctcaatcttccagaatgactaaggagagatttgaaacactacaacacaaaatctgaaattaaaatttatctctaatagagtcactgatggtgggatttataatttgccaactgtttctggagttgttgccttataattggtgatacaagcactggttagccgcaaatctgattttctcaaattgcacaaagacccccggggcatttaaaaccatttatttggtaaccctcccataaagatgttaagtcatgtttagttataaaagttgaaactcaaaattacccatcatctccacaatcacatacacactccatgtgctttatacatagtacacatgcacccctgtgttttccaaacattaagcacaatacccctgtgttgtttcagatttggattatcaattgagagattcacaagtccatgatctaagttgtatactgatttgcactaattggagtttggtcatgcctcaaatatctccaatgatgttttcgtgtttgaggtttaagagcctagacaattaggatcgtcttgcttcagaggtccctaatttgagttgtaggggattagcaaacattgatttgagttttacattttggtctttaaacacattttataaaccttaattggttggagctttggcttttaggaacttcaattggataaagagtgaggaagtgaagaaaataaagatggaagaggagtgttggtgttggcggtgtggttgaggaaggttacataaggcaaggaaattagaggaagataatgattagggaagaagatgggtttctttgactcaaaataaaagtttaaaaaaatttcagggtttgagcttatatctattggtgatatatgaaaattcatggtgcaaagtttatatttttagaaacaatggtagtgtaaattgacaagttagatcttaaattaccaaggagtatcatgcataatgtttgaaaaacatgaaagagaatgcatatgtaattgtggagatgatgatgatttgagaaaaaaagtttcttacaaattatgtgctaatcacgtgatcaaacgaacttaacatcgtttggagcacaaagagtgccaatgtgaaaatgcaaaagttagatgatttttgtgggttaaaaaaaaagagaattcttgtgaaatccataccttataaattggagaacctttggaaagacatgtgtcacattttaagcaaagagaagttacttttctctttcttcttgtgtagttttctcctcctttttgttttcatgtgtttttgtttacattatttctttcttctttctttttatgtttttcttttttaccttcttgctttatttttatacatttttatagattttctttttatgtttatacttctttgtatttatcattaaatttatacatgatttttttttattatatattattttgaatatattatttatatatataacatgaagcattacatagcttcatttctaaatagataagataaaaaaaactcctctcattttattggttaaaaaatattataaattctattctttttcattaaattctattctttttcattaattttgcagtaattttttcatatttattgtttattgtttattatatttttagtaatatgagctatatagtgataattatgaaagaatgaaatattaaataaatattttttagtcatttaagaacaatttttttaccttcattaaatgaaaagtaaaatccattaaaattaataattttaacaaattttaaccaatcacaaataaagtatttgaaaaaagtgtcatacatcaaatttttttatatttgtaaattattatttaatattggatattatttatatattatattataataaccgtacagtgatagtaaaatatgtcattttaaactagttaatactatttaatttttgaattatactacataaactatttattttaatcttaaaaatatgtatttttaaaatatggataatagtgtaataatagattattttaattatataagcactctcttatcaataaatagttggtataaggaatattaggttcgattcttttaaacaaaatcttagaatctagtctttggacagagaataataattaataaaattgttgaataaactacatcaatagataataatccataaaaatatatgcatcctctattataagtgaatttattcacattgaaatttaattgtattttttctttaacatgtattttatcttaaaatttacttatcttttgattgttgttttaatagtaacactatccatttttttatattaacattattcaatttttttatatttaggataattatgttaagctaaagcaatatttcaaaacatttataataatataataatacccctttcaaattatatacaaataatttcaatgtatatataaattttaaagtgaccccatgcccatgcaatatagcacgggtatcacagtagttcgagtaaaatacgagaagtactggcttaatttactcttgaaaaaaaagtgttggactcctgacgtgggtataacggtgaaatcccttgtgttgtgaattctttttgtgggcttatgttgtatcgtagcccttaccgtaccctaatttttctttcttcaaatcgcgcgcgctcctcacttcgagtcttcgactttccttctccgaccatctcgccggaatttcccgcggcggcgctccttgtcgccgcagcttctctctctactgaaaccctagagagagaaaattcaaaaaccatttctctactctgaaattcataaaccctgaaattcaaaaaccctaattcccctgtcaagctcgtagcacagtcacagccatgtatggcggtggtgagtatcaaaaccatttccccttctcattctctttcttttgcttctgagatgtgaactcaattttctccctttggctgaatccacagatgaagtatcagctatagtaattgacttgggttcacacacttgtaaagctggttatgctggtgaagatgctcccaaggctgtgtttccctctgtaagagttttctctactctttttacttttctaaagttttggatttgttgttgtgtttactgttttgctgatatcattttaccatttattggcctatagaataagaaatgttgttatgctctcagttaatagtgaagaggacactgacatttttctgtggtgataggctagttagtactgcttgatagtgaacttatgtatttttataatttataattgactagaataatttctggaaaatgtatgggtagtttgattgttgataataaattggtggttgtcttggcttgtgcaaacttaggttgtgggagcaattgatcaaatggatgttgatgaagcagataatggcgaaaacaactctgcctctgctccggaatcaaataataataatgttagaaatgctgattctgacaagaccaagggaaagaggaaattgtatgtaggatcccagtccttggggtaccgtagagaccatatggaggtaacccttatgtaatggtttttgtgattggacttggattagtaatttacagatttttttgttccttaaaataatgaaaagtgtagttattttcttcttctgtactgttaggtgctgtctccttttaaagacggaattgttgctgactgggatattgttgacagcatatgggatcacgccttcaggtcaatactgactttacaatctgtctgtgatatgtattgtaggattattgttttcctttttgcacttgtttattgttagactattgatatgatagagcaattagttgcaagttgttacaatttaaattcaagttatagataatttattagataattttgagattgttattcatctatactctatatatatttcttgtacactcacaattagatatgaataagatcctaattattccattctttcaatatggtatcatagagccagaagcttaacagccaaattgatcctttttcttttctcttctttatttttttgtttcttcatggtcacctatcattgcttccaatctatccattaaatgtagcctctgccaattaccaaatggctcatctccttgaagccaaaacttcttgatggctatataacgagaatcacatcatgtcctccatccgaaatcattcatgatggttaggccttcttgtttctgccttttttggtggttaagtcattttttttctgctttttaggtggttaagtcattttttttgcttctgccttataggtgataaagcagttttttgcttctgcctttttaggtggttaagccattttgcttctgcttttgaggtggttaagttttttttctttttttttttcttctgtcttattgttgattaagcagttttttgcttctgcctttttaggtggttaagcctttttcttgtttctgtctttttggggtggttaagcctttttcttgtttttgtcttttttggtggttaagcctttttgcttttgtcttatggtggtttagcgtgtttgcttctttaagaggttaagccttgtgttatgacttctgcttaatggttaagtttgcatttgttggctttgatcaacgtgcggattttctccccaaatatcttacattttcgcgccacaaatttatgatgaacaagattggcgttgtctttgccaccactatcttgcgggggcgtgtcagactattgatatgatagagcaattaattgcaagttgctacaatttaaattcaagttatagataatttagtagataattttgagtttgttattcctctgtactctatatatctctcttgtatactcacaattagatatgaataaaatcctaattattccattctttcaatatttattttatggcatatatggctagcatttgataaagctcacatgattccttttttttattaaaatcccttgatgactgatgattcttctcaaaagcaatggtccaaagaatagttgacctgttacctgtatctaaagcacagaaatacatgagaaattctggtagtaatggtgtctaattaatgattgatagtaatcagtaatgaagattttttttccaaacatcaatgcctcaatggtccataccataaatattttcaatttttttttttttatagtaatgaactttcttttcttttacattggctgttcagggccttgctcaacccttctctttcaagtttcaagtaagaattaggaacattgcacgaacacagggatagttagcaagtgttgagtagcaatattttggaggtgaaaattggtgatgacatcatagttgctcctaccacaatagcacattttagttttttttttttttttttttttttaatcttacaaaataatttggggggggggggggttgagggggatgaaagcatatgaatcaaactaagtgaactaacagatagataattaaggtcacaatcgaacttaaaagaaaatcctaccagatagctataagatcagtgatgctttgtatggtagtgaattctggacatcaaagtgcagaagagatttgattgataagtacagcagagatgataagttgaggtggatgagtggatatgcaaagaaaggaaagataagatcaagaacaaagatatacaggaaagagttggagtagcatcaccgaggagaagataacaaaaactcacttaggatggtttggtcatgtgagaagatcaacaaaggctccagcaagaaaactataatgcaatgaaaagggtagaggaaccattaaaaagacctcactaaatggatttgcggaaaactgtttttgatatagcgctctctatattttttgatccatgtaactaactctacctagtggaataagtgcatgtttggatggaattagttttgaagatcataatctgattgatagaacaaaagctgtttgtgtcactaaggctttatgttgttggttgttcttttcctattctggttttgaccatttttccattttattttttatttttatttttatttttatttcatataccttaggaattgttttatttgtcactgggcacacattctttttttggtagggaatggctattgattgggtgtgctttcttttttcttttttggtagggaatgcctattgattgatcctaaagagcatcctatgcttcttgcagagccttcttctaactctcaacaacagagagaaaggtattttggttatgatttattgtctagaattaatagagctcagtttaaagcatcatatgtatgatttggttttttaatttttgcaggacagcggagcttatgtttgagaagtacaaagcacctgcattgtttttggcgaagaatgctgttagtccttcactgacctacacctttaaaaataatatatgtcatggagtgaggatgaaaaactactgattggttctgacttgtcttgacatacaggttctgacttcttttgcatcagggcgtgctacgtcattagttgttgatgggtaagagatcatgatgttactgaatggtagttttgttcttattctgcggtaatatcaatatgaacaaagaacactgatctttctcttcatttctgtataggtgtatatcaattgcttaccttttaagatattatatatggaagacctgtgttgtagttgtctacttgtcttgtttaattataccttacattactttttccaattatagtaggagaatgataggaatttggaattagagaacaaataatggagatcaagctcctaacaagcagaggtagctctctgttgagacttgagactaaaatcaaagaaagaaaataattgggaattatgcagactcagaatatccactcctcctaaaacctctcgacctttaaattcttgcctatttctataaaattcatccctctcactttatccttacatccaaccctcttttttacacacccaatgccaatgcaatcagtctcagtcagggtcgttacattccaaatttctctttagcccctgctcccttatactgtcctcaatgtagtagtcatgtactcgtataaagcctcatagagggcattagactttgctttagtagcaggataagggaagttttatttatttaactgcaaccaatggatcaaaagagttgcgcatactaaattatacttctttatttcagttctggaatagaaagtcttaccattataacagttaacagcgagaaataaaatatcaggaagctttttacttattctgaaacattgttaaataaatgagtaaactgtgtaccctaagttgggggataacaatctgaaagtttctttattatatatatcaatatatgttaacatgtctaaagattgttgttttcctgcttgaccattttaaactgggtttggtaatacacaattagacattggcaatgttccattccaaaaagtggaatgggtaaagcagcattttgaatacatcggaggaggctgatatggatgaaagttgaattcctactatttgattcaaacacagtggattgggtatttgggtggacctttaagcatgagattaagaattcaattgaaaaaactgaaaaggggagagagaaatagttaacttttaaagttcaatatttgttagtacttctaatatgtctcaataacatgccagaagcattgctgataagatgttttcttcattattccattgttttcagtggtggaggatcaattacagttgcaccagtacatgatggttatgttcttcaaaaggtacatgatccatattttgattgattgtttgccaatttattataattgactttaatgctgttttaggaacctgcaccaatttcttgtatgcaccactctgattatggataaatttgaaatgacgagattgtttgattaacaatgggaaatatatacattagatgtatgaacgaaaatcttgacaaataacctggtagtagagtcgtcttctgattatgtaattgctatttttgtctattagtaatttttggttgtgtagccaactgcaaaatgcaattatataggccatcatctctatattattactcaattggtagattgtgttttacaaaactacaactaataattcaaaattgtacgagagtggctatgtgtatgtgatgcactattgcttgccttggtatttactaactaatatttcttcatctatgctctgcatattcgtaatatcttccattttgttttctatgtatgtgcatgccgcatacacacatacacatatcaaattaatttaagacctcattgtactccgcatttatatttgagttttggctaatactatgggtctttcggtctgctcatattttcttctatgtttacaacattaggctgtggctacctctccaattggaggagaatttcttacagactgcttgatgaaaagcttggaaagcaagggtatttcggtgggtgacaaacattagtcattatttttatcagtgatcttctgaaataaaggtactgtgattttatctgcctgagatttccccccttttaattgccacagataaaaccacggtattcctttaggagaaaggaaatacgtcctggagagtttcaggtataatttgttttcattttaatgacctgtgagtaacattttttaattccattatcttgcaatcattaaagtttgaggcaccagacttgtttttttactgttgttttcattaaactttgaacatgggcaggatgaggttccatcccatgtgtattatatgtactgtttgtgcctccgggatttctggatggtttcagtacttcatttttctcatctctattaattgagtgttcttcttgaatcgttttcagtcatggataaaattcgataaaaattgcgtgtgccagtatactgctgctagtgacatgagctgaataatttagctcttgtttgatctactagaatttggttatgtactaaatgtttgtgcaagttaactaattaattttaaacttaagatatcaaacagagaatggtgttgtcctgttaggatataactaaggatcagaacaatgaagatggagtgaggtgtagttatcttactttgtttatttcaattacatatataaccttgcatctgttgttacttgtagaattttggtggcaaatgatagtgagcaaaattgcccagtgtttctctttattagtagctctaaaatttagtttcttgcatttatctttctatatgattttggttgtaactgcaattctatgcttaaataattattatttctcattatcagttttttttcctgaatcttacagacagtagatcttgagttttcaaatacaactgaaagctacaaactctattcccaggtttgtgaatgaccatgtaatatctcattacttgttgcttttcatttatctgatgaatgttcttcatgacagagggtgattgctagtgatatcaaggaatgtgtgtgtcgtgctccagatactccatatgatggtttgtttacctcctgttgtcatctcgcataatgttttgaatcttactggtcctgtacttttgttcaaatcttattggtcctgtgtttcattttgttctttcgaaggcatgtggaaaatttcctagtttttatggtgacaacttttatttcttttgagctcctttctctctgtatacatcttagataactatatatgtgatgcctcttgtgatgttattttctaaaagatggctttacctttttggttccaatagaattgcagtttctgtacattaaatctgtttgttccccttttttctgacagagagtgcatattctaacatcccaatgacctcatatgagcttcctgatggccagtaagttgatgttattcttgttctttgaaatagggaggtggatggaatgaataatgtttcatcttcaaaatttattttttcattttatatgctactatatgtacttcatagcctaattgttgcttctggtttttctgtaatttattgtctgttgttgttttgttatgtgtttgtttttattatgcaggacaattgaaattggatctgacagatttaagattccagatgttcttttcaatccgtccctggttcaggtgtgcggcttgcattcaaagatgtgattagtttatcttgttccttcaatgtaaaagattataatttataatattgcatgatattaaaaatatgccaaagcttcttgcaaggtattaaaagtaaaaaggtgtccttaatgtactaaggactcctagtgccttgaggtgaggtgccaaaagacatgcctcactgaagattggttttaataatcgaaagacaataaaacaaaatttttgctataccacaatcacatccgtgttccacccttttatacaatgaacgaaggaaaaatacaaattttatcactcaagatgtttttggttaaaaaatgataaattttagttatgttaattgttaattaaaaagctgttaaaaagcacagcttgtgacatgaacaaaaacgaatataggctataaatatatagaataaaaactaaattattgagactggtccactttatgttgtgcttctattttattctttaaattacttgagacttgagagtcaatattcctgttcttttgttctatgtgctaattttgttatttttgtcaaatgataattacagtcaattcctggaatggagagctttgcagaaattgctccttcagttcgtggcctgcctcaaatggtaatttaacttgatgtgaatctgttttaagtatttaacttgctattgctgattgttttatcaatttgcaggtgattgaaagcataaataagtgtgacgtagacattcgaagagagttgtttagtagtatactggtaaagttgatttatctttgccttctttctacacacacactcaagtagttcttatgtagaggttaatttagtttaccgcagacatttttggtgtaaaaaggaaaaagattcaggggcatcccttatatggagaatttttagagttatttttgagattgggttgcgtgcgcgggggggtagtgttgctgaagttgtaatttcataatgttaacttaatattttcatcttggttggaattctatttgagttgtatttaaggcaaatgaccttttccctagaactttgaccaacatatatttgctgaaaccatatgctgtacatttattatgtatagtttataatcaattgataggttttgaagcgtttcatatcaatatatcatttcctggtaaattaaaattgatttcatttatcccatgcagcttgctggtggcacagcttcaatgcaacagcttaaggaacgccttgagaaagacttgctagaggtacattttaacaaatgagtccttgtctatttcatccactgaatgccaatatggttgttggtgctgagttcaaatacctttgaagcttatgttgttttaacatgtgatttcaagggatagctttcatttttctttcaagtgaatttagttggtgtctcatcccaaatatcagtagtttggacaatttttactttgttgactgccataatacagccttgtgggggacttgtttcttttcttacgtgcagcagtgctacagagttttcttaaatcctgtgacttcgacttttcactatctaattttggagggatgggggtttgggagattgagtgtaagaatttacagcaaggacttgtgcatacaacaacagcaagaatttttgaaattgtgcatgtgcatataaattttttaatttgtagccaaaggttttagtcttgtcatttttgtagattagaattaaatatatttggcttctctagaaggcttgtgtagtttttgttgtttttttcttccagcttcttgttacttccaaatataattttgaagaaaaatctcttatggtttcctttgggtgtttcttcgatggaacttgcattaggcattggagaaatcttttgtgctaaaatattacatatatatatatatatatatttttttttttttttcctttggttgcttttgggaagaaattgtgtgtgatattgtaagttgtttttttttactgaattacattaacaattaaaaaagttatatagttgtaaagtacaatagtccgtctgtaagattgtgctcaaactggactataagcatttagccaaagcttctgcaggctggctcatctgattaagaagataattaagttgaaagcatttatcaaaatttctcttaggaatcagatttgagtttataatattataaaaacaacacattggttctttttgaattaaatcatcaggtggcatgtgattgcccttgttcttcaagaagctggaaaggttaattgtagctgtaaatattgactacaatttcatttccgttgcaggagtcccctcaagctgccagagtaaaagtattagccagcggaaatgctactgaaagaaggtttaggtgtgttatctatcttatgtcaatgcatctaatcagaggtttagatgtgttttcttttaatgctaggtttggaaaacctttctaaagcttccccctcttttgcaaacctctgattatgattccatttctctccaaaacaagagagaccgagatcaacattttatgtggaagtagtagttgttgatgcattgtacatattgtgtcttatagttctaactctaaatgaatgactttatatgcagtgtttggattgggggtagtatattggcatcacttggctccttccagcaaatgtggttctccaaatccgagtaattataaactgttcaccaaacttgcgattatactagttcattaatgttgatatatatttcactttgcctatcttgtttctcccttttctcataaaagctacgcttctaaatcgggctttcattaaggataattttacactgaatcattttaatgcatttctgataggtatgaagagcatggagcttcatatatccaaaggaagtgtccatgagctgctgttggtacttgtacaagttttttttactgccatttatcaggaagtactatgaacgctgatgtagtgattgtctactaatggatttttattttcctatttaatggccattcccattagatcccaattctaactaaattattggcctcgaggtgaatcacagcccacctttaactgatcttgtgatgatgtaaaacttgtaaagtgtgcctagagtctgtaacgattgccccatttatcaaattagatctctcctgtgtacgtctctttttcttttcttgggtaaatgtgcatactttgtcatgacttgaacttacaaaataagcctctaaacttatctttaaaatttgtagaaatattggaagtgttcctccccaatttgattcattctaaattaataaaggtgttcaaaattgaatcaaatgatttttagctagataatttcatgatttgtgcaagactcgagcaacaaaagaccctctacaccacggagatggtattttttagctggaatttgtaatcctttcttgtgcatatggccaaagttcgaaggctcgagtttcaatgggcatgttgaccattttttttgtgtgcatattcttcatttttgcatttcaccagcccaacatcatcaagcttttgactcagatgaagttgagacctattttatataagtgtatgcttctactattttgcttgtgacatcgtttcccatcgtcattgtaccaaagtcacacttttggatggcagtgaaaaatccccacatggccaaacacctaaagcaacaaacaatccatgaacaatgatcacaaccaaagttgtattctccatgaaaaatacatcatcttggttttctactatgaccataatattatattttttcattgaacaatttggtatgacttaatagtgttagcattttgaattttgcttgagacaccgacattgagatttcttattatgacctaccttactacgatagtaacaagtgatcttggagggttgagatttagataattagatcatttttgaagattcatcactacaatttctacttgtgtttccttcacaagtctcaggtctcccaaaattgtctacaattttatattgtataaccatgcattgttccttcctcctgacttattcattcaatagctaccagtgtagtatggaactatatggttgaaggacttgtaattcatcaagccctttgaaaatttttatgttattgatcatgctttgaccatcattatctatacttcagttttacctttcgtctcaccttaaggagcttagttttaaggaaacttttgttgaatcatggttttaatttttgtccacaatttgtatgcactggtgtagtaaatatgtgcttaaacaagttttgatcaatgtattttcaaatcatagttatcgtcttttgatttagaacctctagtctttgttggtctttccctttagcttgttctattaggtaattgcctcatacaagtcagtaatttttgacaatattaggttgagtatgtcttcatcctaagtgataatacttttcacatatggaatcacatggatgataactctatcaataagattaactctgatactactgttaagaaatatcatcacacatttttccttgttttaaaaattagcgataagagaaataagaataaaagtagaagaatacatgacaccaagaatttttaacataaaaaactctctgaatgtgaaaggaaaaaaatgtaacatcctatcaaatcacaccagaatgaaagagatctataggttatgcaggtatgagactatatagctgaggatgacttacaggaattaattggtactatctatactaataacatgtatctacttttcggtagcccatcacttaagaactttatagttaagcatacttggcttggagtagttataggatgggtgaccttctgggaattttttcagaaagggtgtgagtggggacaaaatacgctgaaaagtcttgtattggtttatggggtcatttgttaattctagaagcagacaaggttgattttcgagatctcgaaaagggctacctatagaggattttgaccggtggagggttttgaccaataaggatgttgagtgaagtgccacgcgggaagtgccgtagtgtgagccatcgagagtcgacaaccaaggatattacaaatggtatcagaccagacctctctccttgtatggtgtggtttgaggatgaactaggctgaaggtggtaagcatgtaacatcttgatcgaatcacaccagaatgagagggatccagagattgtacaagtatgagactgtacagttgaggatgaattaaaggaattaattgatactacctataccaataagatgcatctacttttttgtagtccatcacttaaaaacttcatagttaagtgtgtttggcttggaatagttatggaatgagtgaacttttgggaagtttcctggaaaacgtgtgaatgtgaataaaacatgtcgaaaagtctcgtgttggtttgtggggtcagtcattgattctgaaagattttcgaggtctcaaaaagggctaccaacagaaggatctaactgatggagggttttggctgacaaggatgtttagtgaagtgtcattgagtaaagtgtcatagtgtgagagtcgatcgagaaattgaaaatcaaggatgttacaaaaaaacacgagacctaggtcaacaaaactaactctttttcaaatatggtaaaaatacaagtctctcttgaagtggataactaaaattcattcattttatcgctccaagagataaacttgtaaacttgtttgtcatatatatatatatatatatatatatagagagagagagagagagagagagagaggtcatgatcaaattatatcagtgtaactttaatcaactattacattgttcaataaaattcaattgaataatattttcttaaaatctaccaatggattgaaagttcctttcatgtacatcatatatacaaaatttcatattaatataaaactatttgctatctcattcatacaaattaaaattaacataatattaacttttcaaaatatattaaaatatggattgtttgattatcttcttattattgttcaattttgcaaaatttcacacaaacaattttggtaatatgtaaatataattcaagggttggatcgataaatcgcattctatatcaaattataaaataatgtaatagttgtttatgttatattgatgtaatttggcccctcatcatatatatatatatatatatatatatatatatatattatacacacacatgtatgtgtgagagagagacagagtaaggatgataatgaggatgatcaggaccagtttcactattctcctaattcgtgtccaacctttactaaaggtgggacaagtttaagaagacaaatattaaaaattaaaactcaatctcattcatatcgatggaattaagaaatccacttactattttttttaaaaaaataattattcacttataattttaaataaaccatataccaagttattaattacaaagtggaaatttttttaattcaacctaatcaaaatgagttttttttatcaaagttggatgagaatcagatagatacgtgtgctcaaatttatttttcatgtctatagagaggagtatgacttcttggttgatggatgttaattaatttttgtattcttgaaatttcaaattaatttattttgataagttgtatggaattgtcagagattaaagaatgaattccatgtctttgaaaagttcttcttccttttttccatggattgaaattattaaatcttagctctccatcaaaatttaatttggagggattttctataaaaaagtccatttaatttcatattaaattttaaaaaagttcatttgtttcgctcaaaattataactcactaaattaaggataaattttatcctggttctatttcttattcttattgttttcgatctcggttccgtaggaacaagtcatagagattaagaaaaatagatcattcacaaccattaataaaggattcctcgaaaagttaagattagtaatccttttgaaaattaaaaatagaaaggattcggtcttatacatacgcgaggaaactaataaaaaaagaaagaagaactcatactataacctccccaaccacgattttttatattttttttctaaatattcaacctcaaaataataaattgtattgatactagatatcaaaaaacataatataaatgaaataggacatatataaaaaattagtggcccgctatgccaaaattgacgagggacttaattctaaaaaataaataaataaaaaatagaggatggacttaaccatcgaatgaaatcatcctcacgacccaaagccttataattataaaaaaaaagtattggaatttaaaaaggaagaattattacaatatttgaaaattttagtagataattatcatttagggtagttaatattttgattacttctatttatttcaacgtacttgaatagtatgaaataacaaaagatgtatattttaattaaaactaataagatggaaataaataaaaataaaataaggtacttattagttaagaaagaaaaaattatagtaggatggtgagaattatttttctttaaggaaaaatctttacgccatatatactaatattagagttggtgctccaaactcttagcctaatccgaaagaccatacatcgatttaatgaagacatatatttttatattcttttgggggtttataatagttgcagaagtctcattgaaagggttttatatacactaatataataatgttagaggttttttttttttttttcctgaattgcgatagtgttatagtagtcactctcttcggatctattttctgttgagtaaattgtttcttctctatcacgattttttctgtcaaaatgtttccacgttaaatatcttcttcttccttttttttttcggagatgagaattctaacagttatcagtgttttccgagaggcttataaaaaagtgagtttggtgtatccctgtcttggacataaaattaaataggttagatatactattttctgtaatttaaatatcaatacatttaataatattttttataaataacgaatgaataacgtaataaagttaagttctctctctttcttaaactacttgtaaatacaacttaagtatataaatatataattaaaaggatgattaatatttaccctagttgttggaccaacaacgattgatacaagtaatagtgacttgtgtctcttaatcaaatgatttggagttcgaatcttaattgatcattgattataaaataagtgagaataaaactcataaatttgagtcttaagatttttggttaagatgtggtgtcaaattcacttatatgatttttttcttctaaagtaaatatgttttttctcagtgccattaaattattagatatgtgatatctcttatttttaagatatattttgaaggaatgtctgatccaaatgcgaaccactgtgtgcgcttttatttttgttacaaaaacttttattgactttattgtgaataattaaaaatgtgtttttattaaattgtatatagtaatggttgcataatttttttggagatcgaaatcgtatataagcttgttgaaatatctttgacttaatttgttaaatccaaaatctatattcaattgttggattatgtttaatgagatttgtatatttgacattgaatcaagattctaatatatactttagattattattattttattatatcttgtaaatttattgttgagacataagatgacatactctccaccttcatccaacgatgataaacaatttcctacatgacatattgtaaattgatgcaaagttctaagcattgcacacgaaaatgcaagtttttttcttctgataataatattggtacgaagtagttttaaatttgtgagtgcacacaagcagggacagatctagctggggtgagcggggactcaagccctcctcttggaacttttcatctatatacatatatttttaattagttagtataaaattatataaaattaattttgtatgttgtactataataatgattaatgtccatcaatataaaattggataaaattagttgtgtttgttatttgcaatgattaaagtgataattagtgtaaaattatgcataattaattgtatgtttattgttattataataacaattaaggttatcatcatttaatataaaaattagttttaattttatgtgtaatttttttaaattattatttattaaaagctaggcatttaacaattataaaggaaggaaaaaaaattcagcccctttgtaagattcatgtatccatcactgtacacaagatgtgtaattactcgccatgttttatttcatacaaagagtcaattaaaattcaaatattgaatcatttgattaaaatataaaaactagtaccacttatatcgacaattattgataagttttttcttttgttactttataactgcaaagtattcaatatttactaattttattagctgtttggttttaagttttatcagtattttgtgaattctaatgtaagattatgagtttcaatacaaaaaatgaaaacaaaaaaaaatgttgctttaattgtaaaaatattttttgagtccttctacattttatggatgattaatcttcattaaataaattgatgaatcatttttaataaatttcttgttctaatcatatttatttttcatatataataaaggtcaaacttgatattttagctaagtactcaatacgacctggatcaacataatgttattatggaatgcaaggtttaagtatttttaaagaatttcacaaaacgtagtttctttaattgaacaagtcattgagaagatattaacttgatatatttaatatttttaaagcaccaatatatataaataataggactctcaattttggttgtgttctcagaaaaaaggcatagctagagatagagaatcatgggtaaccctaaacaaacacttgggagtttcgcagtggtaacactactctttgctggggttattttgctgtacaactggtcctcctctttctccaatgaattagtgttatccaagaaggaaccactatgcgagcaatcaaattctgtaagttaattcaatcacccatattctatgtaattttctatcaaaaaacaaatcatgtgtattattattatttttaaccagaaactatgagtgtctcataactcatgagtatattatattgttctttataatccggctgaaatttaatttcaattttatatataattaaaagagtaatgttgcattaatcccatggatgattttttttagtatatcaagcatataaatgggttttttttttttttttgcaataattttccatcattttaattttcctttaatttgtgcatacattttagaccaccaccaatgttgaagcacatggagatagccttgactatgctttggccaaagcctcaatgggaaacaaaacggtgataattactatagtaaacaaggcctatgtaaagcaagatgtagagagtgacaccaccatgcttgatatatttcttggtaatttttggcttggagaaggaacaaggtctctcattgatcacctcctcgtagttgtggttgatagaatggcctatgatcgaggccaatttttgaggttgaattgcttcagattagaaacggatggtgttggttttgaaggtgagaaaatataaatgtctcaagatttcatcaagatgatgtggagaagaactcaattcctcttggaagttctcaaacgtggctacaattttgtttttacggtacgtaattctcttcttttccaatttacaagtatttgatttttaatatggtatcagagccatgacaccctccatgaaaaagaatcatgtttctttcgctgccacaagaatctttttcttccccattccatatccaaattatctttcttcttcacattttcaaacttacatctccttttatcttcttgtatcagtacctgtattcacttttatttctctcaaatccctaactcccttctttgatgaccaattctgattctgaaatacccaactatctatctgttcattaaccattaccttctccgttttatctacaaattatcattattatcatcatgaactccatctttgtctcgcataaccttcgcgtcttcggtctcgacttgaacctcatttgcaccttattgcatcacaatcactcccttttcctttcatctcgccaaattaaaatcttccttcccttgacgcaaccttcctatgtgaattgacgcaccattgtgatgtctcaatgcactcattataaagtctccacgaacccgttttgaatcccttcccatatctcaattctccatgcacgtattccatttgaaggtcattgatgtgaagtcagttgcattgttctgaatccttcacataccaatcctggagtctattgacttgaacatgtgattgttttgaatctcttctcgtatttcaattctctttatatctcacataactgaagcacatgctgtgtactatcttgaagcacctcctgaacctattgctaaccaaagttatttatagaagagtgtttgaagaagccattggcaagttggcatgaccgatattcatgcaccaacttgaggaggagtattgaagatataatttgaatttgaattattgtttctattagttaggaacattttgttaaaatagtctagataagaataagtttgaattattgtttcgtagtttgaattattgtttcctaatattgtattcaggttgttaatattattagtataaatatatctcatttaagatgtgatgaatgagtgaatgaataaggaattattattccaatttatgagtatatgatttttaacatgttaaaaatcagatactcataaattggaataataattccttattcattcactcattcacttatatttcatcccttaaataaggtatatttatacaagtaatgtttgttacctgaacacaatattaggaaataataattcaaattaggaaacaataattcaaacttcttcttatctaaactattttaacatgttcctatctaagagaaacaaaaaatccaaattatatcttcaacactccccctcaagttggtgcataaatatcagttatgcccaacttgtcaattgcttcttcaaacactcttccagtaatgactttgaccaacaataggtttaggaggtgcttcaggatagtccacaacaggtgcttcggttatgtgacgtagaaagagaattgagatacaggaagagattcagaacaatcacatgttcaagttaatagacttcagggctggtctttgaaggattcagaacagtacacgagcttcacatcaatgaccttcaaatgaaatacgtgcatggagaattcaaaactgaggtacaagaaggattcaaaacagatttgtggagactttagaacgagtgcattgaggcatcacaacggtgcatcaattgacgtaagaaggctacttcgaggaaaggaaggttgtaatttagcgagaggagagggtaaggaaaaaggagtgattggcgatgcaataaggtgcgacgggattcatatcgggactgaagaaacgaaggttatacgaggcaaagatgaagttcatgaaatagtaatcataatttgtagaggaatcagtgaaggttaaggaagatatagatggttgagtatttcagaatcagaatcgaccatcaaagaaggcatttgagagaaataaaagtgaaatacaagtactgatacgagaagataaagggaggtgtacgtttgaaaatgtgaagaagaaatataatttggatatggaatggggaagaaaaagactctaatggtaggggaagaaacatgactcttatagtgttatgacactgatgtcatgttaaaaatcagataaggataaattggaataataatttcttattcactcattcacttatatttcacctcttaaatgaggtatatttatacaagtattgtgtaatgttaacaacctgaacacaatattaggaaataataattcaaacttcttatctaaactattttaacaacttattcgaaaaacaataattcaaattcaaattatatctttaacctttacatgtttttattgatcggtctttctcatgtttaagtgcatagaattgaaatagtggtctaaaactagcttgaattcttactttgttttcttctctagtttaagtcaatatttttttttttggtgaagcctagtttaagtcaaatactacaccttaattatgtgcaaaaaaaaatactaccttaatataaatttaaagggagacgtaccatcgaagatcattagaaataaaataacatttatttgctaaaccccatgtcaatatttggttttttttgtattaattatttacctgattcgtccattaagcaatgtttgatttgttaccaaacaagtcgatacacgtcacacctttttgtataaagttttggtgcaagtaacattctcataaatgtgctgaaaagagaatttattgtactcatattgagaaattgacttagttacgcactttcagctttgagcaatatgttcgtagtttctctttgttatccagatttacagatatgcagataggatatctatctgatctggtagagtggtaaagagataagaatcaattaggataatgatttgtcgttatataatgaaattaattatagctaaatgaaaagataaggataatattgattttttaaaaaataattacaaattatttaatattttttagataattattataatgattaaagattaagagtgtttatcagcttgctaattttcaaaactaggtttaaatgtacaatgtcaatggagttgggttttagatatccaaagtgtttaatttgataaaatgcttcttattctttttttctaatttaataaaaaatctaaaagttttatcttattttattatttttgaaagaactgcacgagaaattcaaactacaaaatattgaaaatataataataaagtaaaaatagtttgaatttcattaattttcgtaattattgaaaaataatattccaaactaaagagtttttcaatttttttcttcctttcattctcttttttgatttgtgtggtaggatgtagtcaatggagttgcatgtttatttatctaagatttaatctttcatccatctcatattatttttttgacatcaatccatctgagttcatatgttcaaatcatgaatgcgattattgtaaaaaatgtcttttaaaataatatgcacatggttagaaaaattgttaattaaaataattaccaaaataaaatcatttttatatcaaaatagaagatattgttgaaattaattaatattttgttaatttattgaaatattaaattacttaattttaaaataacctatctagattctagactcaaatttactcgtataattaactaatttaatcatgcactattttttaaaaaaattacaagctttgaaactttttcaagcgtgaacatgccaaacttataaaaaaaaaagttttaaattgcattatgaacatgccaaacttcacacagaaagttgtgtgccttgaggttgaagctctaggtcatgctacgtttcttatttaaattatttcgtaattcgatcgtagcatgtggtcttggggtaacgtatatagtagacaacatgcagagtgttaccagccaagaagggtaatgggtgatttttttctttaagggctaattaagcagactacaagaaaggcttttaaggtcggttatttcacccatataaagtcggttctggaaccgaccttgtatggcaacgtcgtcaaaaagtccagtctaccacgtcggttttttgaggaccgactttgaaatttttttaaaaaaaaaaatcgtacattctaagtcggttatttaaaaaaatcgactttaaatgttagatacaaagtcggttattttaaaaaaccgactttaaatattgaatacaaagtcagttattttaaaaaaccgactttgaaatcttggatacaaagtcggttatttttaaaaaccgacttagaaagcttggatacaaagtcggttattatcaaaaaaccgactttaaatcttagatacacagttattttaaaaaaccgactttgtatccaacatttaaagtcgattttttaaaataaccgacttagattgtacaaattttaaaaaaaataaattaaaagaaaacatgcgggtggcaacgctggagagggtgtctattcattcaaaacccatttacaaaacccattcaaaacccatttacatgcaaaacaagggaatagtaaactgaagaacacagagaaaatgtaccttaatgatctcaactaactgatctctccaggaaacaatggctgcaaataatacaacatagattactatcaatctaaaaaacccagtaaaaagaaacaaggaagatgtcttaaaagaaaggaatcatttcaaattcattccaattcaaatgcttaaaggaagttgtgtagaccaactaacagcaagtcattagtcatagcacttatacaataaatctattgtgttacttctggacgatgataattttacatagtaaattacatttcttaagctcctttttagaaacatgatatttttgttttagaaagagttcaattttgatacacttggctgaagatatggtttttgaagtaattgttatatatgaggaccaaagaagtaaatttgtatcatacaattatatatgaatgattaaaatataaatgttaattcatatgattacttgaaaaagtcatttgactctatttcctaatcttaatttttcataatttgatataataattatcattcattgctctcattatcataataaaagtcttcttactgtgtgcaaggaacatcatttaaattgatattgaataaacataaattaaccaatccaactattggataattttatatatatcattttatataaattaaatatttttctaatttgttatctagtaataaacatttagtaatattttaaataatatataatatactatacatcaaaatatagtatgataaaaaatattaactttcaattctacggttagattagttaatttgatattctatagaaagacattaaatagtgtatatggaaattaatcttacataactaattaaaaatcaccataaaatataactttaaaaataattattaaaaaaatatattattgaatgactgtataaactataaaaacagttgcccagtttgtgtctatatatgaaagttatcatcacataaaaattaatttacgtgttttttttttctttttcaaaattacttcatgcataaaagttagagggaataccagaagattgctctgcattgctatttgctaaactagtacataattttagaaaatgctaggcagaatttaatttagtcacaaaaaaaaaactatgtttgtacgtatgttataacttataaataataaataaacccgaatcggatttttgttcaagaatgaaatcttattggaactgtccagttcaccctttaattaaccaatagtgtgttagcttgaaatataaggttccacataactggaaatataaatgatatcctaacccaaacacaatactaacacttaaaaataaaaattaagaagaaaagaaagaatggaaaaaataaccgtacttaagtgcttcaagaggtttactaggaaacgaagcaagtggactctccaaatccggaagattgttgaatccatcctgaaatagagcatgatgtaaaaatcctgccagcatacttaaaaaaaaagtatatagttcaagtgctgttataccaaatgaccatatatctgctcttagagaaaattaaaatatagaactcagaaaagactaagatattagtgcacaaaaagatgatgataaaattacacctaagaggaagggaagaatagaagacacttacttaaaatcatatccatgtaattgctgcataacttcaggagccatcctgtggaaaataaacacaactcatagcttcagcattcatacatacaatggtagccagatgaaaaactacaataaaggaggattattaggatggtagtaccagcaaggtgttccaacaaaagtgtttcttgaacgttgcctatctccagcatcaaacatacatgctgacactccaaattcagctagtttgactgcaccattaaatgaagcagaatattcccagactgcatggttaaaaataattaaaagaggaggaaaaggagaagaccagaaaaccaaaaacatggagaaaagagaaagaaaaaattcatgcatgtaaaaagaaatagtttttggattcagctacagctttacaagcaccataaaagcagaaatggagctctaccagaaactcatattcaatcaatcaattccatttagtctatgattatgaaatctagttgtaagattctcaattttcaatgtcaaaagggagcgtagcttttaaaaaataagaggtcagatagttgatgcacaatacctttacatctctatgtatgtgaccatgtgcatgaagatagacaagagctttgagaacttcatgcaataaagtagcaataatggaacccacgtattcattcaacagactaaaaaagtgaacaactgagaagacacaaatacataaattagcaccaaacaatgtaatgaataataatgattgaaatcatccttttttataatttcacaagtcattgaatccaagcatgctccatttaagtgaaaaggagaagtactgtaaaatatggaaacaatatataatctacataccaagtcaaaagacaaggttttaggcttaaaattgaaagctaacctgctgcacgaagaaaactcaagttccagaagaagaatggaagtttatttattggaagaaaacaggttcaaaatctgaaacttaccaaagtattgatagcaaacattcaaaacggcagaaaaatagccaataatgctcaaaacgacagagtatagattaagaatccaaaacataccaaaagattgacataagaaaaccacgtgaaaggttcaagcaaggcacttgagaagtgagaacatacacacaaatactagttcactagcacacaagaaaatgtagaaacaagaggcaaaccttaccagctgcaaggcatcagtcatggggctctcaccatagacatgcatatctgtgatataaatgtgaagcagcattttaaaaatccacaagagaaaatgaagattgtacccagataaaaaactggaaaaggaacacaaattagaaattataatcatgaaattcaaataaggtaataattgaaaggcaaaccccaaaaacaaaaatcctgaaaactaaacatgctcgttcaatcattatacagagtaccacgttgataaagcacttcattctgaagatatattgattatatcatgttagcttgaaaagaatcaaaagatacattgagagagaaaccacttcattctttccaaccttagttgatcatcttcacagcttctacgacctaattgctattacttccacaaagaaactaatgaacaaataaacaaaaaagtggtctcctttaacttctggttgctaatccctcagcaaacaaaaactcacacattgatattagcttctgagagcaaaatgcaaatcggagcttaacagtgactattgggaattcaaggcatatcaatcccaacagtttctttctattaattatatgactctttgttgaacttccatatatcaaaatatgcaggaaaaataagaaatcctagcaaatgcatttaaaattgaagctcagtttgaacctgggtagcagcagtaatcgcacaagctacaagaataccagaagccacgcccttgattccattgaaattaaacatacctcccttattctcatgatatccatctaactcagctactcctacaaaacaatagccacactacaagtacaaacttaaatggcaggtaaaatgcaagttaggaaagctcgttttgaaactttttagaaactcctcgccacctctggcgactacgtccgcctctgggtgctctgcgacaactccgtgaaggtcgtctccctcttcaacaatagtaagaccagcgagttctgcacccccttaacctccttcgactggaacgacatcgaccccaaccgcatcatcacctccagcaacgacaccacctgcaccatctgggacatcgaacgcaccctcgtcgaaacccaacttactgttcacgacaaagaggtctacgacgtcgcatgaggagaggctagagtcttcgtctccgtctctgccgatggctccgttagaatattcgaccttcgcgaaattgagggagggaatgtttttcacggagttcaaggtggagaacacgatggcgggtttcgctagttggacaatgtgagtcaactcggattgggaactgagcgggttggaggtggaggcgacggggaggagggagaaggcatagtcattaagggagagggggtgggagggcagaggtttggacagagaatgtggaaggttctgcaataggaatgtgagatggcgcgagtgagaaaagtaaatttatttgaattattgaagacgatgacgatttcttaaaaaaaaccgcatttgaatcattgtatactaagacggttttcttataaccgtcgtcgttgtctttggcaagtgcaaaatattacaaaaatgccaccgcttactcaacaatgacggttatctcatgaccgatgttgagcgcgtgtcgttaaagagtgtttgtgtagtagaattcagaaatgatggccagaaaatgagataggttctgcataaaaacatgtgctttgaatttaaaaaatgataattcgtcaatgacgtgaaatatgaagaaaaaagatattgcttagttttggggtactaaccattagttttgtttttattcaaagttgaccttgaaatttataatcatcccattattcaaatatgttcaatatgtctgggtgtaaaaacgcctctctctttttgtattcagaaagataattgcactacataaaaaaaattgcaatagggaatcataattatggtgatggagggataatgagtggaaaataacaaagattaaaaaaaatatacataaagattcttgaagtttgagaaatttaaaatatataaactatatttatgatactattgtattaaattaaagattttattacaagtattaaaaaataggctaaattataattttttatcttcttatattctcaaatacgtgtgtttttagtccttccattttttaaatacataaaatacaatttttctattgtaataatttgaaatatttaaaatatatatatatatatatatatatatatgtgtgtgtgtgtgtgtctgtgtgtgtgttttcatattttaaaaaataattcttttatatttttaatatgatattgaaaattgttacggattcggtaaatgggcctattaataaggtccattgaggaatagtgggttgttgatctcaaacgaaagacaggtcgtggttgctgaccatttcaaggatcgtgaggtcaagcggttaaagatctcgaccaggaatatcggagaatccacaactgcctcagaggtaagcacgcaataaatagtggttgcattcagaggaaaaggtacacaattcttactctctctttctttcacacagtgcacacacccacatccattatggtgttattcctccaaagcactgtgatcttcttctctgaggtatttaagccattacagatattctcagaaggagagaggaagagtttgatccaatagcaaatcatcaacatacttgttgaacatctctgtttgtcacgaacagaacattggcgtcgtctgtgggaaaactgtaaatttcaactcccaccaatcacgatggtaaacacgagaagccatcagaatgaagagcgacaggaaccacccgtcaacgtggttccacctgaagccgtacaggtagaagatgcaatggtagttaccgcttcatctcctgcccagccgggaaggttcatgccaaatgacccaccccacgcttcgaccggggtggaacaagatacgattcagcgttttgttcataacgcgctgcaatttatcttgtcccggatagaatgcctggaaaaatgacatgccctccaacgacagaaggacatcaataatatattgatgcaggtggatagacgcaccggcaacttagagacccagtcgattttctctttttcctcctccataagagtgactccaaagagccaatacctagataacagaggaactgtttgtcgcaattccgcctcttcctctggggtaagtttcattataatctaaattatcggtgttatcaagaggtttgtatagtttttgcataaatgagcgatgaagataatgggaagttcaagaacggttcaagttcaagaacgaataaagatgaaggatagaacagaagcgaaaatgcaagaaatgaagacgcaaaaaacaaaagaacaagggaatcataaacaagaaaaaagagtttatggtagagaaaatacctgggaaagatcttgaagaaatttgaagaagagagatgatgagcgtaaaaggaagcccaaatgcagagaaaagacacaaataagttgagaatgatagtagtggaagatgaatagaagggaggaagttaaaaattaattagaagtgtaaccgccaaatctatgaagcaacatgaatgtacagttggcaaatgtgaaacgtcgcatgagggcaaaagggtcaaatccattcaataatgggggcaagaaagacacatattttcaaacgtcatgattaaagcacgaagcatttaatggtgcagaccacatgctacagtgacagacaagacccaaggacggcttgtcagcgaccttccgtgttaccatatggaaaggacgtgatcaagccatacctagttaacatcaccataggggtaatagaaggaatgggtacaattctcggacctcgacgcccaatgaccgaggcgagatgaagtatcctcggcatctgatgaatcctgacaattactgaccgaggttagataaaagatacctcggcgcccagggtttgacaagcgacttacgagttgggaaattcatccaagttgttgaaagattgacttatatgcatcccggtcatcgagagacctcgacaaccgggctggggggcaactattacggattcggtaaatgggcctattaacaaggcccattgaggagtagtgggacgttgatctcaaccgaaagacaggtcgtggttgctgaccatttcaaggatcgtgaggccaagcggttgaagatcttggtcgggaatatcgaagaatccacaactgtctcagaggtaaacacgctataaatagtggttgcattcataggaaaaggtacacaattcttactctctctttctttcacacaatgcacacacccacatccattgtggtgttattcctccaaagcactgtgatcttctttgctgaggtatttaagccattacagatattctcagaaggagagaggaagagtttgatccaatagcaaatgatcaacatacttgctgaacatctctgtttgtcacgaacataacaaaaatcaatggttagtataagatataaaaaaagtggattcaaacaatacacaacaaagcacaaaataacaccccgaacatttactttgaaacgagcttataagagagaaactttaatcatgagattcatccaacggactgtaatgctgcaggagagagctggagaggatccgcatccggcattggtatgggttcatagaccaattttaattttttaatgcttattatagttttatactttgctttgatatgttttcaaatacagtatattattatatttaataaatataatatattttaatacattaaaaactttattattttttatatttgaaagaattctttgataaagcttattctaaaatagaagaattgaaagatataataatataatatgtacatctataatattgagttcattatgtttttatttttttattttgttaaaatttctacttttagttcctgtaaaaaatactttcatgggtcatagtacattaaaaactttttgtctatgttttgggtcagttgattgttaaatgataatgtgatatttatattaatatttttgttgttttgtaatttagtatttttatttatttttgtaaatataatttttttattttaatctttataaaatatgtttgttttatttttcattaaagtgttttatataacacttaaaatagtaaaaaaaatactttaaacattgaaaaaatcttatctaaaacacgtaaagacaaaaaataaaataaacacattttacaataacaaaaatgaaaaaaagaatttgcaagaacggtatttgactaacattaaattttcaaacttttcttgtctctccttttttatcagcatttaaattttaatttatctatcctctcttctctaaagtaaatttaaagttatgtttggtgaaactaattagaagttgaaaactactaataattgaaaattggatattaatagttgaaaattaaaaagttagcttattaaattataagtgttcgataaaattaactattgtaataactgaaaagtgtaaaatagctaaaaagaaaacaagctcatttgttttagtcaaactaatttaaggatactatattaattataattaagttaaaaaaattatctctcctattaaattttcaaacttactcttctctcttctgtcttattcgaattaaaattttaatttctctctcctctctcctaataatataaatacaaatataaatgcattataaaaactatattttataaaaataaatgtttttactttccaatttatagtttttttataattttatttacttattaaaagaagtaaatcaaattaattaaaatatgttgaatatgaaaataaatgtaacttttttgttgacaacaaaattaacgtaactttgaacaggtcttttttataactttaattaactaagattttattatattattttctacactcaaatagttattgtgaaaacatttttaattaataatttctatatttatatttttttattgagagatatatttctagtataatttcccctatcgtggatatattatatgtaccaaataaaaattcgaagacaaaaatgttccaattcacgtgattttcctttataaaaatggttgatatttcaaattcatttaagttaaagaattattattattattattatttaaataaatctgaaccaatatctcaacaattgtctagatttcatgttgtatttttttaattatttagactatgttcaacaaattatttcaactagtttttaacttttttcaacttttttcattagttaaagctgtagaagggattgcacgacaaccggaagcagagggaaaaatacgaggtactttattgcttagtctggcttttatggaagctttaacaatttatggattggttgtagcattagcacttttatttgctaatccttttgtttaatcctaaaaaaatagaaatacatatccttttttccgtggacttgctttaccggtcttgctttttcgaattctatctatattaatatttcactcctataattctttatccgttcggacaagaacacaggggaaggactaattgaaaggtgaagaattcacatacggattcgccctctttcttctcttttttagtccaataaccccgtttcttgaagtatttcccatacaatcggttctttttcccgaattttactcttagcaatccctatgtttgaagcaaaatgttttcgaattagaccacgaattagaaatgtctgcaaaagttctattgctatttcgtggggcaatccacatctatgtaatgaaagtgatggacctacgacaatgacagaacgacccgaataatcaacccgtttcccaagtagagtctcgcgaaatcttccatctttgccctcaattatatcacacaagaattttgtgaattcggatttctagtatgaaaatattcgtgtaaaattgaaataaagcgaattatactttgatttgttttataaattctttcggcatttgcttcattatcataaatagatttatttaacatttttttgttaattcaagaaaaagttgtatattgatcctcgaaatacaacttatatatagaaagatatctctgtatatacttttcatgaaaaatttaaaaaaagaatgtgatttacgagttaatcgagcatttcttcttctttgtaatatatgccatttttttttttctaattctacccttttcctatcataagttgttttgttcgaatgaatatttgtctctgaaattacaaaccctctttttttaattttttcaatttttttttataattgctttttttttagcattaatatcctttatttttttttcaatgaacaatttactgaatttatcgattgaattgaaatggttgtttcagaaaagacattgttgagaaaaagatggcttttcccagatgagatggttgttgctatctgctccaataacgaatcacccaagtaaagaactgttacaaataaggaagaaatgaataggtttaaataggaagcaacataaaataaatcaaatttgatacccgagtatttagtttcataacccgctactagttcttcttccgcttctggtaaatcaaaaggtaatctttcacattctgctagggaagagattagaaaaacaatgaaacccataggttgatgccacaaattccatccccaaaaaccatattttgattgtgcatcaactatatcaactatacttaaactgttagataatcctagtcggtgataacattactgttaccatctctattacagaaccgtacatgagattttcacctcatacggctcccttaaagccttaaaaaaatttaaggaccggtccgattatttatcccttgatatatctctaagatagataatattcgattttatcggacggttccgaattagacctattgaattctgtctgttctaaataaagaaattttaaaataaatacatttaataaagaaaaaataaaatacattttaacatttctttaaataaataaaaaatacaaaaagtacttctgaattgatctcatcctttaaaaaattcaaatttaaattggttgagtaataacttaattcttccataaaatactcttttcaaattattaataactccctcatcattttcgattacgaaaaagaattatacatgttcattttttaaattatgacatgaattctatctatataaatatggatggaaaatcttataaatcaaaattaaaactaagctaaatgaaaaatattctattataaatgaagcaaaatctactaaagtattatactacaaagaagaattagacgaattctatcaatatccaaactttattctattgtatagaaaaaaaaataaaaaaaaagtaggttcttttcttgatttgttccacagcgatatgaaatagctactaaaggctttgttctctttttagttatttgagaattatccaatttgaattatggagttataaatattaggagtttttttttcaaaaagaaaatacgaaagaaaaatacttaagttatagtttaattgatttgatgattttattgatctatttgacatcataattttctacatacattctaattttttattttctcgagccgtatgaggataaaacttcttatacatttctaggggggaggtgcattatttatatatctctatcccaatgagccgtttatcgaatcgttgcaatcgatgttcgatcccgaagagagggaagagatcttcggaaagtgggtttttatgatccaataaagaatcaaacctatttaaatattcttgttattctatatttccttgaacgaggcgctcaacctacaggaactgttcaggatatttcaaaaagggctggtgtttttatggaacttagctcgaatcaacaaacgaaattcaattaatgaaataaacaaaggggggtgtggatgacttgtatatagatttataaaactcttttcttttttatccccccgctctcttgttctattcatacctaatttttcttatttcttgttgtttatatagaatgatagaatgtagttttctatagtcagaaaaataaatgaaattttcatcgatcttcaaaacaaaatgaaaaaatgtatagagataaaagatagaatataggaaaaagaaaaaaaaatagtcactaaatgaagtaattggacttataaatagagaaatagattatccctattgaggtgctttttgttttaatgtttcttattcttttttattttattatcatttctttttaatacccactcgctctttattattttcagttactaatcctagttatttgatttatatactttttttatagtaaatacatgagatagaatattcaaatagaatagatagaatattcaaaatggaatatttctattattttattcttcatccaatgactatacattcattatatttttgtgtaaatagaggaaaaactagatgaaaaaatcgtagttgaattctatgttgtttaataggaaggtagaatacaggtgtaaattaagtaaatcaatggatagtcttggtcctattagaaataccagtctaagccaacaccctaaaattttaaccaatatagataaaaaaattcatcgttgggatgatagtgagaattctcattatagtttttttgattatttagtaggtgcccgtaacatacaggatttcctatctgataaaacttttttagttagggataataaaaggaatagttattccatctatttagatattgaaaatcaaaattccatctattcagatgttgaaaatcaaactttggggattaacaatgatcattcttttctaagtgaactggaaagtttttttttctagctatttgaatactgtttctaagaatgatgatgattattacatgtcagagactccatttagttggaacaataatattaatagttgcattgatagttatcttcattctcaaatctgtattgatagtttcattttaggtgatattgacaaatacaatgagagttatttttatagttacatttttgttggaatttcgaattattaatttctattttcattttttcttagattcgaatccgaaaataaaagagttaagtgaattaaaaacccaagggaggttcatggccaaaggtaaagatatccgagtaattgttattttggaatgtactggttgtgataaaaagagtgttaataaggaatcaacggatatttctagatatatcactaaaaagaatcgacacaatacgcctagtcgattggaattaagaaaattttgtccccattgttgcaaacatacaattcatgcagaaataaagaaatagatcaaaattttggcgatgataatcattgaagatattgttgaaaattaattaatattttgttaattaatttattgaaatgacatataatatgacccataggaaatattaaattacgaaattttaaaagaacctatctagattctagactcaaaattacttgtataattaactaatttaatcaaagctttgaaactttttccagcgtgaacatgccaaacttatatatatatataaaaaaaaaaaaagttttaaattgcattatgagcatgccaaacttcacttagaaagttgtgtgccttgaggttgaggttgaagctctaggtcatgctatgtttcttatttcaattatttcgtaattcgtagcatgtggtcttggggtaccgtatatagtagacaacatgcagtgtgttaccagccaagaagggtaatgggtgattttttctttcaagggctaattaagcagaattcagaaatgatggccagaaaatgagataggttctgcataaaaacatgtgctttgaatttaaaaaatgataattcgtcaatgacgtgaaatatgaagaaaaaagatattgcttagttttggggtactaaccattagttttgtttttattcaaagttgaccttgaaatttataatcatcccattattcaaatatgtgcaaaatgtctagcgtaaaaacgcctctctcttttcgtattcagaaaagataattgcacttcataaaaaaaattgtaatagggaatcataattatggtgatggagggataatgagtggaaaataacaaagattaaaaaaaatatacataaagattcgggaagtttgagaaatttaaaatatataaactatatttatgatactattgtattaaattaaagattttattacaagtattaaaaaataggctaaattataattttttatcttcttatattctcaaatacgtgtgtttttagtccttccattttttaaatacataaaatactattttttatcgtaataatttgaaatatttaaaaatatatatatatatatatgtgtatgtgtctgtgtgtgtgtttttatattttaaaaaataattcttttatatttttaatatgatattgaaaattgttacggattcggtaaatgggcctattaataaggtccattgaggaatagtgggtcgttgatctcaaccgaaagacaggtcgtggttgttgaccatttcaaggatcgtgaggtcaagcggttgaagatctcggccgggaatatcggagaatccacaactatctcagaggtaaacacgctataaatagtggttgcattcataggaaaaggtacacaattcttactctctctctttctttcacacagtgcacacacccacgtccattatggtgttattcctccaaagcactgtgatcttcttctctgaggtatttaagccattacagatattctcagaaggagagaggaagagtttgatccaatagcaaatcatcaacatacttgctgaacatctctgtttgtcacgaacagaacattggcgtcgtctgtgggaaaactgtaaatttcaactcccaccaatcacgatggtaaacacgagaagctatcagaatgaagagcgacaggaaccacccgtcaacgtggttccacctgaagccgtacaggtagaagatgcaatggtagttaccgcttcatctcctgcccagccgggaagggtcatgccaaatgacccaccccacgcttcgaccggggtggaacaagatccgattcagcgttttgttcataacgcgctgcaatttatcttgtcccggatagaatgcctggaaaaacgacatgccctccaacgacaggaggacatcaataatatattgatgcaggtggatagacgcatcggcaacttagagaccccagtccatggaggaaatgatggacaaccctctcgtccaatcagggccgaaacacccagtcagattctgacttttaatgccgaagtcgacatccctggactgaatagccatttcgaacccggaggatcatatcgtcaccaaacacgaaataacaaccctgggcgtcgtgattcacatgctgaggccccacgccacgtcatcaacacagaagcaagcccagcgaaatcaatacagacacgggtagaaactcagaacctagtggcctaagctatacatcagcccaaggtaggcgatatataccggagaaaatatagacgaggataacacaacaacagtccgttcgttgacgagatcgtcaatgcccagttcataaaagattttgacggatcttttctatcaaaatatgatgggagtcaggacccacaggtgcacatcgacgagtttgacatgcaaatgtgtgtcagaggcattgacgagccaataatatctcgcatcttcgtcaccacattgtctggggctgctcaaacatggttccacacattgccaccacggtcgatatggaacttcgaagatttcggtcagaaattcttgctcaattttgcaactagcaagaaacagctcaaatccaaatttgcattggggaagatacgccagcaacccggagagacattgcagagttacttagactgtttcaaagaggccgccctgcaagtacaagactttgaagagaaagtacatgtacatctcttgtcggtcgggcttagcggatcatcccgattagcaaaatccatatacaaagacccagtgaaatctttgatggaattcagagtacgatcaaagaaaaacttagagttggagcagatgaagatcgccaatacaactcctagaaggaaaagatccccaccaaggaaccgacatcatcagagaaaccctcatcccggcaggaacatggatcccgattttaggccggggaaatatgaaactaagtacgacaagtataccccgctaaatacttcgcgggcacaagtatggagggaagtcgctctaacaaacatgaagaaagcggatcgacctccggccagtgttcaagaaggttggacttgatcactctcgcttctgcgaatttcataatggaccgggtcataccacggatcaatgttgggacttacgagatgccatagaaaaatttatccgagaaggtaaattgaggcaatatgtcatcaaaacgcaaggccaacgaagcaagagaaaggtcggtcaaaacgaagcccaaccacaaaaggactgggatgataaaaggaacaaacgagatgatgacgagttcccggaaccagagttcgagtgcaacgtgatctcgggagccatgggaggaggaggaggagacacggctagccaacagaggacatatctcaaagaagtcctcttcgtaagggagcaacccagattcaaaggaggtaaccgcaaaatcgagctccctctgctctattttacagaagaggatatgagagatgtagtccccggtcatgaagatggcttggtaataaccggaaccatagttaattgctgagtcaagagaatattcgtagatgatggcagctcggcagacatcatctcctggaatgccttcaagaagatgaatttggacgaggaggatttgaaaccatgtaaaaccatgttaataggtttcaacggcgggaatacaaacatcaaaggctccatcaacctccgtctaatgttgagaacgaaggaggctttcaaatcagagagggtcacttttgtcgtagccgaattctcctcaccatacaacatcatcctggggagaccaacaatccacaaatgggatatgttattatcctccaaacaccagaagctgaagatggtcgggagcaatggcaaagtaataaccattcgcggagagcgaaggtggtccatcttcaccacctcggattcctgaaggagaacaagtcgagcagaaaaccgttgaacgttgaaatgaaaaagcaataaatctggtagagctcgatatgagagaagacattgaagaatgaaggccagaaccaggggatgagctggaggatattcagataggaacccagccatcacaagtcactaagatagacagaatatctgacacaactgtcaaagccgagctaacaaaatatctgaaaaagaatcaagatgtgtttgcatggaaagccttcgagattcccgggataaaaccaactttttctttcacaagttatccatgtatcccggctcaaaaccagcggccaagaaaaagcgaaaccttggccccgaacgtaagcaagccttggagaaacatatcaaggagctgttggaggccggcttcatgagagaaatccaatacaccacatggctatctaatgtggtgatggtcaagaaatccaacggcaaatggcgggtatgtgttgattataccgacctaaacaaggtatgccccaaagattcgtatcctatgccgagcatagatcagctggtagacaattcatccggtttcaaattgttatcgttcatggatgcttattccgggtacaatcagatccccatgcatccgtaggaccaagaaaagacaacatttagaggaggcgaggcaaattactgttataacgtaatgccttttggcctgaagaatgtcagggccacttatcaacggatgatgaatagagtcttttcccagtgactcggtcgaaatattgaagtgtacatagacgatatgatcaccaaaacaggctcgaccgggaatcacattcaagatttggaggagacatttcgcagattaagggagcacaacatccgcctaaacccactcaaatgtgcatttggggtgactgcaggaaaatttttagagttcatgttgacccataggggaatagaagccaacccggacaaatgcaaagcggtgttgaacatgcaattcccgaccaataaaaaagaagtgcagcagctaacaggcagattagccgaattgacacgctttcttccaaaatcagcagaaaaagcacttccttttttcaaacttctaaagaaagaagccagggtggggtggaatccggaaatgcgaagccgctctccaagaaataaagaaatgtcttgcctttcttccaatattgtcaaaaccagaacccggtaagacactaatcatatacttatcagtgggagaagtggtaagcgctgtgttagtcagagaaataggcaaatcccaattaccggtatattttataagtcgggctctgaaaaactcataattgcaatatcataaattggaaaatatggcatttgcacttcttataaccgccaaaagactctgcctgtacttccaaggccacactgtcacagttcgtacaaatcaaccaatccggcaaatcttgcataagccggacttggctggtagaatgatgagttgggcaattcaactgtctgagttcgatttgaaatatgaagcccggcatgcaattaaatctcaagcactggccgacttcctggtagaactcaccccgacggtaccaggagacacggagatttggaaactatatgtggatggctcgtctaacaccaaaggaagtggagcctggataataatcgagagcccacagggaatctcggtcgaacagtctttacaactcaatttcccgacatctaacaatcaagctaaatatgaggcattgatagtcgggctgatatcagccaaagaacaaggagcctagaagctgaatgtatttacagactctcaactcgtcacggcccaaatcgtaggcagatatcaggccaaaggacccctgttggtcaaatatttagccaaggtcaaagaaataattgttgaattcgaggaagtcgtcatcgcccacattcctagagaggaaaacgccaaagccaacatattatccaagttagcaagtaccaagggcactggtaaccacaggacagtggttcagcaggagatcttccatcccacttgcatcttactgatctcggcaaccgaggactggaggaaaccaatagtcagttacttagaacagggagcaatacctaatgactctatggaagctaagaaattagtctgagatgcggtcatgtacaccattcaagaaggggaattatatcgcagaggcctgcacaccccaatgttgctatgcctgggcccggattagactgaatatgtaatggttgaaatacatgaaggcatcaacggttaacacatgggagcaaaagctcttgcaatacaagccctttgagccgggtactattggtcgacaatgaaggtcgacgcctcaaatacgttaaacgatgtgagaatttccaaaagcacgcaaggattgtatggtcaccttctaccgagctgacgtcgatcacgaccccttggcctttttacaagtggagaatggatcttttgggaccttttaatgctacgaagggacagataaaatggctgatcgtagccgttgactatttcacaaaatggctcgaagctgagcaactagccaccatcacctcggcccgagttcaaaagttcattgaaagaagcataatagcaaggtttgggatcccggctgaagtcgtgatggataacggaactcaattcatcgataagttgttccaggaaataatggtcggattccatatcaaacatcacttctcgtctgtgaaacatctgcaatccaacggacaagcggaagctgccaataaagtcattctgaaaggattaaagaaacgaatgcatgagattggttcaaactgggtggagcaattgtattatgtattgtggggacatagaactacaacccagacatctactcgagagactccattcagaatgacgtactgctgcaaagtaatgattcctgtggaaatcggacaaccctcatggcgaagaaggcacgcactctgtggaggagaggataataatagcgaagcattggccaccgagttagaattcattgaggaagtccggaccacggtacaccaccagaatcaaaacatgaaacaggtgatagccaagaagtttaacaagaaagtaaaacccagatgtttcgaaaaaggtgacctagtactccgaagggcggatatcggaaacaagaacacccgggacggaaagttggcagccaactgggaagggccgtaccggataactcagaacctcggatagggggcacacatgctggagactctcgacaataaagcaataaagcgcacctggaatgccgacaagttaaagatatattacagttaagaggtcccgacaacaacttcagttttcaactatgcttcctaaggaattaggacctcgtggcaacatcagcgattagttttcatttctataatattgtttacatttcatgtgtttctctttaattgggagtatgaaccgggtcgaccagtcaggcacccgtaacccatacctttctctttcattgagatcatgaacctttgtaatcattccaacattcttaataaatattcttgttgttacaagacaattacaaatattatgcacagcacgtgatatctatgttttcaacaatgctcaacatgtaattcgaaaccctgatcaggttcacgtaatcatttattaataacgattgtgttgcatgttaagtattgtttggatataaatcggaaagtatttaaccggtaacataataccgacgctagactcgtataataataagcttggtctttggaaccaaaggaatagctagttaaacaggcaaattatagcgttggccaaaacgtgaatagctcggaagtcggttcgcaaatataataatgagaagacgattcaatgtcacatgaaaataacaaatataccaagttcaaacaaccaggcatagcccggcaatattcaaaacagcgaaattacaatttttcaaccggcatcctggtccttcacatactcatggcgcctggggttggactggatcaccaccttcctgcacagaggtcacttcctctccatgaggcagatcctcatccacggggatcatcgaatgttaacaaggagaggagggagggatcaatttgttatcctctagatacgctctaaaatgcattccggtggtgttcaactcaatccccgggttcaaatagcgcatttgttctagagcattggcaaaggactcctcagtcgtgatggctattccttccttcaactgcatagcctccacctaggcctcttccaacttccggtcactccatccaacatcgtcttcagttcgttcacctgcccggataggagtgcattttttctccgagctgtttctagagccgtctgggcaccctcggcagtatctagggcaactcagagctcttggcgaagggaggccgaggtatcctatgcagcaaggagctcctgatgcatttttcgggtctcttcctgagaggcatcgagctcgcccaacactttgccgtgccttttcttcaagttggctaagcagtgtatcagggcacctcccttgaaaatattttcttcgataaggttgagatccttgatatccccatcagaaacgtttgggagcatttactgcacgtactatctcctcggtaaccccttctcccaaaggcagcccggagtcggcttggaggctgaggtaggaggtggaagtgcggaagatgcgactcccagacccgaagaaacgggcggctcgcgttgcttggccgcaaccatttctgaccgagttgtttccacggccttgcgcttcttcccttttcctccctcaaggagagctacataggagaagggatgcgaccgcttcggcgggttggggagcttggtggttggcttggcagaaggcttcgttttcccaaccagcggggtcggacacacgaccacgggaggaacgaccaccgcggtagcagcagaacccgaggccaggatctcagtgggtggagccgaggaagaagcaagtgcttccatactgtcagctgtgaacaagaataaaaccgttagaacggaataaagcatacatcaaaaatcaatatcagttatgttcatactcaatgtagtgcaggacccggaaagatatccacgcaggaaaaaggcagtgtttatcaactcatgagtggccctatatgcctcgatgcgggataccgatgaagcttcaaaatctgacaagtccgtttcctcgaaacagtaaaagcccggggcaaggtcatgatagaggggaaacctccaccccacatccgaggtctcaagagaaaaaagaaagaatggttgtttgtctggttcggcaacaaccttgaagaatttatttttaaaatgtttaaaggactctgaatacactgaaaaaagttttcggtcggaatggcctcgaaaggaagtccatcctttcttgttagagggttccctacctgtcctagcagtatgtacggtaaagtaataaaaaaagacacgaagtatacaagggacccctagaccatggcagaagacttcaaaagcttgcataaatccccaactattgggatgaagctgagagagggctaagtttagatggttgagcacttgtacttggaaatccgagaaagggaagcgaacacccatgcgggtgatcacgtccttataaaaatagaaaaagttgtgtttgttcccttcccggaaggagcaaacgggcttatccgagccggggactctaacgcaaaacccatcttggttgccaactgggagcgcaacaacgctctccagatccagatcagagaaggtgtccaacacttcacgggtgacccaagggaacttatcagctaaggtcgaagtggggagattagaatttgacccggcggactcggcaactaattctgaagatgacgggtccataattacctacgtaaaagaaaatcatagtcagtaaagcagcagtatacctggagagatgtcggttatacgaggcggagaggggtcgtccgggatgataattatatcatcgggctacccgacatttaggcctagagcaggagggttactcggcaccctaaggggcgttggccgaggaggtttggccttcggtacaagaactgaatgtgacgacagtttccaagaattgaatccgccttggaatcgaaaccggatcttacataataggaactctcgatgacacaatccatacaaggatcgaaccgagtttcaaaagaggatcctactggaagatttctcggctctggaggggattgcggaggttgcaactcgggaggtactgaccgaggaaaagagcatttggcggaaggtttaaaacttgacctatcctcatttccacaaatagaggattgacggacacaagttttggattttggtatattgacattcaatgtcctactacctagagggtcttagttctttgaagttctgggctgtgacttcttggactttgacgtcccagtggtgtatgaacgaggctgagatttttcccattcgattttctctttttcctcctccataagagcgactccaaagagccaatacctagataacagaggaactatttgtcgcaatttcgcctcttcctctggggataagtttcattataatctaaattatcggtgttatcaggaggtttgtatggaagagtttttgcagaaatgagcgatgaagataatgggaagttcaagaacggttcaagttcaagaatgaataaagatgaaggatagaacagaaagcgaaaatgcaagagaggaagacgcaaaaaacaaaagaacaagggaatcataaacaagaaaaaagagtttatggtagagaaaatacctgggaaagatcttgaagaaatttgaagaagagagatgatgagcgtaaaaggaagcgcaaatgtagagaaaagacacaaataagttgagaatgatagcagtggaagatgaatagaaaggaggaagttaaaaattaattagaagtgtaaccgccaagtccatgaagcgacatgaatgtacagttggcaaatgtgaaacatcgcatgagggcagaagggtcaaatccattcaataatgggggcaagaaaggcacatattttcaaacgtcatgattaaagcacgaagcatttaatggtgcagaccacatgctacagttacagacaagacccaaggacggcttgtcagcgaccttccgtgttaccatatggaaaggacgtgatcaagccatacctagttaacatcaccataggggtaatagaaggaatgggtacaattctcggacctcggcgcccaatgaccgaggcgagatgaagtatcctcggcatctgatgaatcctgacaattactgaccgaggttagataaaagatacctcggcgcccggggtttgacaagcgacttacgagttgggaaattcatccaagttgttgaaagattgacttatatgcatcccggtcatcgagagacctcgacaaccgggctggggggcaactattacggattcggtaaatgggcctattaacaaggcccattgaggagtagtgggacgttgatctcaaccgaaagacaggtcgtggttgctgaccatttcaaggatcgtgaggccaagcggttgaagatctcgactgggaatatcggagaattcacaactgtctcagaggtaaacacgctataaatagtggttgcattcatagaaaaaggtacacaattcttactctctctttctttaacacagtgcacacacccacatccattgtggtgttattcctccaaagcactgtgatcttcttctctgaggtatttaagccattacagatattctcagaaggagagaggaagagtttgatccaatagcaaatgatcaacatacttgctgaacatctctgtttgtcacgaacataacaaaaatcaatggttagtataagatataaaaaaagtggattcaaacaatacacaacaaagcacaaaataacaccccgaacatttactttgaaacgagcttataagagagaaactttaatcttgagattcatccaacggactgtaatgctgcaggagagagctggagaggatccgcatctggcattggtatgggttcatagaccaattttaattttttaatgcttattatagttttatactttgctttgatatgttttcaaatacagtatattattaaatttaataaatataatatattttaatacattaaaaactttattattttttgatatttgaaagaattctttgataaaacttattctaaaatagaagaattgaaagatataataatataatatgtacatctataatattgagttcattatgtttttatttttttattttgttaaaatttctacttttagttcctgtaaaaaatactttcatgggtcatagtacattaaaaacttttcgtctatgttttgggtcagtcgattgttaaatgataatgtgatatttatattaatatttttgttgttttgtaatttagtatttttatttatttttgtaaatataatttttttattttaatctttataaaatatgtttgttttatttttcattaaagtgttttatataacacttaaaatagtaaaaaaaatactttaaacattgaaaaaaaccttatctaaaacacttaaagacgaaaaataaaataaacacattttacaataacaaaaatgaaaaaaagaatttgcaagaacggtatttgactaacattaaattttcaaacttttcttgtctctccttttttatcagcatttaaattttaatttatctatcctctcttctctaaagtaaatttaaagttatgtttggtgaaactaattagaagttgaaaactactaataattgaaaattggatattaatagttggaaattaaaaagttagcttgttaaattataagtgttcgataaaattagctattgtaataactgaaaagtgtaaaatagctaaaaagcaaaaaaataatgatttatttaaaaaagataatcaaaaaattggataaatatattaaggataaaaatagaataaaatataaaaaattagaatctaacattttaaaaaatgttacttcaattaacattttaggaaatggtagaaactacttaaaaaatatttgtttaactaatgaaaaaagttaaaaactagttgaaataatttgttgaacatagtctaaataattaaaaaaatacaacatgaaatctagacaattgttgagatattggttcagatttatttaaataataataataataattctttaacttaaatgaatttgaaatatcaaccatttttataaaggaaaatcacgtgaattggagcgtttttgtcttcgaatttttatttggtacatataatatatccacgataggggaaattatactagaaatatatctctcaataaaaaaaatataaatatagaaattattaattaaaaatgttttcacaataactatttgagtgtagaaaataatataataaaatcttagttaattaaagttataaaaaagacctgttcaaagttacgttaattttgttgtcaacaaaaaagttacatttattttcatattcaacatattttaattaatttgatttacttcctttaataagtaaataaaattataaaaaaaactataaattggaaagaaaaaacatttatttttataaaatatagtttttataatgcatttatatttgtatttatattattaggagagaggagagagaaattaaaattttaattcgaataagacagaagagagaagagtaagtttgaaaatttaataggagagataattttttaacttaattataattaatatagtatccttaaattagtttgactaaaacaaatgagcttgttttctttttacattttttaagttaaatgataaagtatgataatatttttaaattaaattttgagaaataaaaaattcaatgattttttagtctatttttttgtgttaaatggtctgaccatctagtcaaagcagtttttattttagttaggctttgaccatccttaagaatatatatatatatatatatatatatatagatatagatatataataattaaaccatgtagttagttacatgttggttgcctctcaatatatatagggttctcaattttggttttctgtcctcacaaattaaacggcatagagatagagaatcatggatactaaacaaacacttagaagtttggcgatgataatcattgaagatattgttgaaaattaattaatattttgttaatttattgaaatgacatataatatgacccataggaaatattaaattacgaaattttaaaagaacctatctagattctagactcaaatttacttgtataattaactaatttaatcaaagctttgaaactttttccagcgtgaacatgccaaacttatatataaaaaaaaaaaaaaaaagttttaaattgcattatgagcatgccaaacttcacttagaaagttgtgtgccttgaggttgaggttgaagctctaggtcatgctacgtttcttatttcaattatttcgtaattcgtagcatgtggtcttggggtaccgtatacagtagacaacatgcagtgtgttaccagccaagaagggtaatgggtgattttttctttcaagggctaattaagcagaattcagaaatgatggccagaaaatgagataggttctgcataaaaacatgtgctttgaatttaaaaaatgataattcgtcaatgacgtgaaatatgaagaaaaaagatattacttagttttggagtactaaccattagttttgtttttattcaaagttgaccttgaaatttataatcatcccattattcaaatatgtgcaaaatgtctagcgtaaaaacgactctctttttttatattcagaaaagataattgcacttcataaaaaaattgcagtagggaatcataattatggtgatggagggatattgagttgaaaataacgaagattaaaaaaaattatacctaaagattcgtgaagtttgagaaatttaaaatatataaaactatgtttatgatattattgtattaaattaaagattttattacaaatattaaaaaggaggctaaactataatttttatctctctattttttcaaatatatgcgtttttggtccctcataattttagttcttcatttttaaaaatttgtaattttagtccataatttattaatcgagacattttgttcttattttaaaaaaaaatcataattttaattcttgtgactaatttcaaatattgctctatttattctgtaaacattgattgatatatgtttgtttcttatctatatgacaaatgtttgtttaaattattaaattgttaacaagtttaatttattaaaaagaattaaaaaatacataaccaacaagtttgacattgatcaaaaagattaaaattataatttttaaaaaagtgaaggacgaaatgtttaaattaaaaaataaaaagattaaaatcataaatttttttaaaataataaaatgtctctattaaaaaattaaaaaattaaaatcacaatatgagtaattcttgtatggtaaggagaccttaatttctttcttttaattttcttcacttcatcatataaagagacgttacctattgcatgccaatgcttcttcttctccattgacatattgcattaattttgtggtagacctaaactttgtttggtgacactcatactaaaatcagcaaattaaaatgaattagacataaagacaacacgtaaagaaagaataaaaacccatgaactatataacccaaaaaattataacaaaattaatttagtaacaaagcatttaatttagacttacatatacttcctttccaaattttactttatataagattcaaatttaaaatctatattttcaccctgcgcataatattcattgtgaatttgtttttctactattccggattaacatgatatggttatgttggagagagagagaaagacacaatttttatcaaataacacagattattttttttactgcaacacattatgattgattgtatgtctcattaagcactcattatatttcataagatttataaacaagaaaggttctaaatacttaaatttccttttaattgtaactgcaccaaatatatgttaataatgaaaacaaaattattgttgcacaaaatttatttcaacttctcatataaaataaccaaatagttgaatgaaaaattatatcaatttcactttttcaactttttcatttctctaattcatatgcaacatctttttttcacaggacactggtgcaatatggctaagaaatccatttataagattgagcaagaatgagacagaagacttccaaattagcacagactcgtatcttggtgatccttggtcagaaaaacatctgatcaacactggattttactttgttaggtcaaacaacaagaccatctctttatttgaaacatggtatggccaaaaggacaatggacaggaaaaaaaagaacaagatgtgcttcttgacctcattagaagtggcatagttgaacacctaggacttagggtgaggtttttggacaccctttatttaatttagtggatttttccaagatagcaaggattttagggcagtcgccacaatccatgccaattgttgtaggagcatcactgcaaaggtagcagatatgaaggtggccctacgtgattggaagaaatttaagaggttggaggccaactccacagtaaatccccaatggactaagcacaattggtgttggcaatcttggggaagacccatcaaaacaaacagctaagcatcatatcgagttgaatgagatatatatattatccaacatgacccacatttttttatgtagtataaacgagcatttgctttaattttgaaaagtgaagatttgagctttttttgtgtgcactattgtgtagagattaatagatgaatagaaaaatatttatgttgatgtgttgtaagaattaagaggacgagtcttgaattgacccagcagtaaaattatgtcttgataatttattaattatggactgagtgcaatatctcttctccttatatatgcatagtttgaagattctggacaatgaagtatgtatttttttttatgtattgtgagaattatacttttttgtaaataaaattgattttaattattaaaaaatgattaataaactcgtaaacataaatagatagtcctttaatttgtaagtaatggcaattgtggggaagttgttgaaaaccatgttcaagcaaccaggtacggcaaatcaaagaaaaacaccaggatttgggcaattgtggattgtgggttgcatgaaattggccaatttcttttcaaatagggctttggtttaagctggttctggctgggttggcattggtaggatgcgaatcctctcctgcaacatgttgtttgttggaatatgaattccatggtttaaaaaaatgcttctttctttaagtgcgatggatggattttcttatcatcttaaacttaccattgattttaaatgtcctattataaaatcctttttttatataaatatactatatattttaaaattattataatggaaaaaaaatattttataaataatatattaaaaatgaataaaaataataactactaaaatatatttttaatttgaataaataaaaagcatttagttaaataaaaataaaaataaataaaacatacaattaagacattattattatgaaacgaaatattaattatttaattggatttaattttaaatgcaataatagtgtgagagttatactaatatcccatcataaattgttatttgtcgcaactttttgaatttttaataattattttaaaattcatgccacaataactttaagtggttgataattacatcaaaacattaatttcttttaatatgttagactagattatttagaaaatttaccttaaatttattttttttatatatttaacacctattgtatctatcttaaaaaataaataagagaggaaaacaaaaaaaagaattaaaaataaattatttagacaaataaaataatataaattgaaaatgccttcttttatttacataaaatttaaaaaggtaaaaataataaattatattaattgaatgttttatttaattaataattatttatttattcaaattaaaaatatactttagtcattatttttattgttttagtatttttatacataaaatacattttgtgtgtgtgtgtgtgtgtgtgtgtgtgtgtgtgtgtgtgtgtgtgtgtgtgtgtgtgtgtgtgtgtgtgtgtgtgtgtgtgtgtgtgtgtgtgtgtgtgtgtgtgtgtgtgtgtgtgtgtgtgtgttttatttaattaataattatttatttattcaaattaaaaatatactttagtcattatttttattgttttagtatttttatacataaaatacattttgtgtgtgtgtgtgtgtgtgtgtgtgtgtgtgtgtgtgtgtgtgtgtgtgtgtgtgtgtgtgtgtgtgtgtgtgtgtgtgtgtgtgtgtgtgtgtgtgtgtgtgtgtgtgtgtgtgtgtgtggtgtgtgtgtgtgtgtgacaatacacaacaaagcacaaaataacaccccgaacatttattttgaaatgagcttatacgagagaaactttaatcatgagattcatccaacggactgtaatgatgcaggagagagctggagaggatccgcatccggcattggtgggttcatagaccaattttaattttttaatgcttattatagttttatactttgctttgatatgttttcaaatacagtatatttattaaatttaataactataatatattttaatacattaaaaactttattatttttttatattttaaagaattctttgataaaacttattctaaaatagaagaattgaaagatataataatataatatgtacatctataatattgagttaattattttttaatttttttattttgttaaaatttctacttttagttcctgtaaaaaatactttcatgggtcatagtccattaaaaacttttcgtctatgttttgggtcggtcgattgtcaaatgataatgtgatatttatattaatatttttgttgttttgtaatttagtattttttatttatttttgtaaatttttttttattttaatttttataaaatatgtttgttttatttttcattaaagtgttttatataacacttaaaatagtaaaaaaaaaaatactttaaacattaaaaaaccttatctaaaacatttaaagacgaaaaatgaaataaacacattttacaataacaaaaagaaaaaaaatatttgcaagaacgctatttgactaacattaaattttcaaactttttttgtctctcattttttatcatcatttaaattttaatttatctatcatctcttctctaaagtaaatttaaagttcactacaaaaaaaatcggtcggtaacgtcgaaaatccgtcgctaaaccgatatttccgacggaatttcgacggacaaaaatccgtcggtaaaatgatcataggaaatctaatccgtcggtaatttttgtgtccgtcggtaatttccatgggaactttccgacagatttttccgtcggaaattacctatggaaccatccatggaaaattttcgactgaaaaatccgttgaaaatttctcccaatgatatgtatgaggaaaatttgcgaccgatttttctgtcgaaaatacacaaatggacattaacgactttttttccatcgcaaatttttgtcagcaaataatttttttgtgatttatttgataatttttttcctgcagcattttttatttgatactcatttgtattatctaatgacaatagtaaaacaatattcataaaagcaaataataaaatggtaaaaactaatactaaaatggtcaaacaatattcattaaggtcaaactaattaactaaaattcaaagtaatggaatcataaaagcaccatgtctaaaaagtcaatactaataataaaatagacaaaagtcagtaatcagaatagtctttactagagtccctgtgttgatgatcttgttgttgttgatcatgtggttgatcattttgttgttgttgttgctctggaagctgatggtcaggttgttgtgggtcaggcagatgctgctcatgttgtagttgttgttgttcaataatgtttcgcgcttctggaagtagaaacttaagtacaactgaatgtaatacacgcacctcctccttcatttgacgaagctcctcccttagtcgattaacttctgctgaatctgttgcttgactggaagatccttacatatgctgcatgaacgtgttatctggacgtttataagtatgtgcaacgtctccaagcccataaacacgtcccttttgctttggtcccgcagcagcaagccaacactcagtcctaagtctttgttcttcagcagggtctaaaggagtcatttctgattcaccaacacttgatgcatcatcggacttggcttgagatagtctagcctcaaagttttcctatcaatggtaaacaattataattaaataaaagtattaaacattgtaaaaaaatagagtgcttgacgaataatgttctcacatgtgtgtgcctagatctatcatcgacaaattcaccagtatccttccgtaaatgagtttgttgaaaaatttcatcaagatatgcagatcgaccaagctcctgagactattatcaaagtaaaaaaaattgaaccaaaataattatacaactacaaataagtgagttaatcaacataaggtgatcttaatcttaccaaacgaatggcatgatcttgcaaggaaatggaaccacctgtgtgcatacacccacccttttcagatgcccgatttttttttcctgtatacacttggaatgatactcaggggcattccaatgtgataacagatcattccaaacacgatcttcaatccaatatggtcttttattttcattttgggcatccctaaacatctcagaaagtctatgagaggctttggagttaaaagctttcttaatttcatcctcatcctccggtctccataccaattttctctaaagtatcagacatttatcaaatgttttgtagttaggaaaataccaatcggtctaaattaaatgaaataaaacaaaaccaggtttaacaaacaataatctaaagtcccaatatgataaaacatgtcaattagttaccttaaaacacaaatcaatttatgtaatgaaggtataattcttgaatcataatgtgaaattgtatatgacattgaagtaattgataaaacatgtgagttagttaccttaaaacgctgaaaaaaaagatcttgttgatcttttggaattgctccccatgttggccatgcattgtcaaattgttgtctaatggataatgtcacagcctttgccgcaacctttgatggataaaaccttaattaaaaaaaatcatttaatgatgagaatgcatgaattgcaaagctttgtaatcttaatttaaatgtaaatttgaaatacttacgctccattcatcagtgtaatcgtaggacgatcattcaaaggggggtcttccatggccaaattaacacagtcttcatcagtaggcatgttccctatagccgtggatggggatggtgtggatgtaggcacgggagacggtggaaccggtgtaggtacaacatttgcatctttatttggcatacatacagaagaaggggatgaagtacttgatgggagacttactctaggtggtcgtagtctaaccacatatgcttttttcctcccacttgtttgttttccactattctccatggataggggtcggggaggatcaacatcacctgatgacatttctatatatatacaaaaataatttaacaagctacatattaaaatagtgtgaattcaatcaaaattacataagtgcttgttttagagttacacaaataataccaattgtcccctaataaagtcataattaaattacaaaatttacatgcatacattcataaaagtggaatataaatctttaacatgcatatatttattccagaacttctgtctctttggtctctgatttaacaaacataacttcatgtctttgaatcatcatcaagcaattcttctatgtttaaagactattcaactctctcatcatccatacaatgttcataaagaggaacataaatttttaacatgtctctgactactttttgatgttccctctgttgcctctctggtctaacaaacaaaggttccacattaacttttccctgtatctcttgtaactctaaattgtcttcaactaggttatcatccatacagttagttaactctaaagagtgttcaactctctcagcatccatacaatgttcataaagaggaacgtaaatgtttaacatgtctctaactactttttcaagttccctatgttgcctctctggtctaacaaacaacggttcaactatcttatcattcatacaacctacccgtaaatgtaaagagtcttcaactctttcagcatcaatatggtctgctaaatctattgagtcttcaactatttgtaaatcaaacgactcaacaactgtatcagcatccacaaagtcgtttaaatctattgagtctttaactctatctaaatcacaaaagtcagacattgtatcttcatccacaaactcctctaaatctaaagaatcttcaactctctctaaatgtaaagaatcttcaactctctcagcatccataaaattttctaaatcaacagactgttcaactctctcagcatgcataacttcttctaaatctaaagagtcatcaactatgtcaccgtccatagagtcatcaatgatcattgaaagtaaagactcgtcaactcttttagcatccatatactcttcaattatggaaagtttctataaaaaatcattcaaaattgtgtgagggattaaaatacaatgactgaatacaaggtaaacttcacataataaccaacatcatgttatcataagtaaatgataggggtatatgcaaagcaacattgtgcaattaccataaagtccagacttgacaatcatgtgataacaatgtgactacgcatataatgatcaacgaatatgatagtaagctatttaaaaatcacaaagttgcattaaggtttacataacaaaagtaatatactaaagtagtataatacaagttaacactatgcagaataaactccatatcatgggttatcctcttcagaatggtaaacctcaaagtcatcttctacatccccttcattgtcaacttcaaaactatggtgttctgcatccatattatgcgatggaccttcatctatgaattcattaccaatgtccacttcttcaactgcgcctcctaaatcttgcaatcctgaaatattttcaacttcaataacttcattgacatgtgacatttcgtctagctggtaaggcacatcatttgcaacagagttggattctatgtaaccccttggctttgttttaattgcaatacaccaaccacgtttgtctcttcttgtggctggataggacacataatacacttgccttacattatatgcactgatgaaggggtcatatcgattatatcttttatccattctaatttccacagttccatattttgtatccactcttgttcctctacttgatggatcaaaccattcacaataaaataatacaacccgcttatcataggttgtactgttatactgtagctcataaatatgtttaataaccccataaaaatcatcttctcctccttctgtaaggccctttacgtgaaccccactatttatggttttctttccctcagtccatgcttcactatgaaatttgtacccattcacaaagtatgtgtgccattgtttaacgtaattcataggaccatatgataaatcccataagtgttggtttgtcacattaataccagcattatgaacctacaaacagtgacaataagttaaacaacgctaaaagttgataaaataacattggtgaactataacatactaacttgttgcttaaaccaacttggaaattctgcatgtacgttgacactataggcatgtggttcattttgttgttgggattggtagaatgaactgtccaatgaaacatttaacaagtgtcaaaccaaattatttcagttcccaatcttataaatttaccacctataaactgcaatactggaatacttactcaaggtatggcttaacttcagcataattaatcaacacatgaacatgggctgagtctttctcgatatcagttaaccagtgaatcaactctgtcccagaggatcgaccatgctggtcaaagattgataacattggtggacggctttcactatcaactgcatatggatttctaacattatgtggtactaacataaagttgttgaaataatgtgaacaaaaatgagttgtctcacgatgtaagtacgacgcacaaatggaaccttcaaccctagccttacttttcactcctcgcttagaatcgcccatgaatctacaacatttacataacatgtaacaatcgataagtgttccaagatgttaatgtgtattaaaccaatataaggttgaaaattattacctttcaaattgatacatccatctatagtgcactggtccaccaagtctagcctcataagacaaatgaactgataaatgttccattgaatcaaaaaaaccaggggggaatattctttccaacttgcacaagattaatggaatattttgttccattctacgcaagtcatcctccatcaaagtcgaataacacaaatctttgaagaaatgacttatttcaattattggatttaacacatgcagtggcaatgagctaaaagcaataggaagtaaacactccatgaatatatgacaatcatggcttttcatcccatgcatggttcccttagcaacattggcacatcttgccaagttagaacaatactcatctggcattcttagttcttttatccattgacagactaatttggtttcctctgcagttagagtgtaacttgcttttggctttaacaacctcccgttagcccccgacatcagctccaagtctctccgcctacaatacaaagctaagtccttcctagctttttcgttgtcttttgtcttaccattaacattcatgatagtgttgaatatgttgtcaaaaaaaaaattctcaatgtgcattacatcaagattgtgtctcaacaaattatctttccaatacgaaagatcccaaaagatgcttctttttgtccaatgatgccattccccatatccttctaatgttggtggaggcacccctacttcagtgacttttgaaaaatccctaacccggcaccaaacttgtctaggtgtcaataaacgtggtggctcatcagtttctatttcccctttcttgaaggtgttttgttccttctaaatgcatgatcaagtggtaaaaactgacgatgacaatcaaaccaagaagttttgcccccatttgccaattggaaggcctttgtgtcctccatgcagtacggacatgccaatctaccatgtgtaccctaaccagacaacataccatatgcagggaaatcattaatagtccacatcaaagctgtcttcatcatgaaattttgcctttttgaaacatcgtacgtaacaactccatcccacaacttgttcaaatcatcaataagaggttgtaaatacacattaatacccacagttggattaaatggtccaggtacgacacaagtcaaaaacatatatggtttagtcatacacagttctggaggaaggttgtagggggttacaattattggccaacaagaatatggtgaagatgatgcttgaatatatgggttaaagccatctgagcataaaccaagtcggacatttcggggatcaatagcaaaatctgcatgtacccgatcgaagtgcttccagacttcaccgtcacaaggatgacgtaacatgcccaaactgcttctattgtcatggtgccatgtcatatgccctgcagtttgcatggatgcaaacattctttgcaattttgggattataggcaaatagaacattgacttaacaagaattggtttcgtattcctttttccgtcaggagtagcacaatacctgggcttgttacaaaatttgcattcagttaatgccgcatcagtgttataatacaacatgcaaccatccacacaacaatcaatcctcttagcctctaatcccaactttgatactaacctctttgtatcataaaagttttttggcaagttctttttttcaggggtgacatctaaaagcatttttaagataaactctaggcattggtcagacatattccaatttgacttgcaagctaatagccttgcatatattgacaatttggagtctgctgccccttcgtacaacggttgatttgcctccaccaacaaactgtaaaatctttgtgtatcatcatttggaggctcttccatagtataagagtttggaggttcaaatgtctctggctgtctgagagcatcgcacaccatgtcttgcattgacaaaaattgttcttgttgatccacatttgttgcgctatttgatgcatccatgtaactaatgtcgtcatttattccaaaatctgacatgtcttcaccatgatctgtccaaatccaataactaggcttgaatccatttttatagagatgaactttgacaactctatcccccaaaatgcgagtacaatcgcatttaacacaaggacatcttatccccctatcattgtcatatctaggttgttgaatagccttgtttacgaactcatgaaccccatcaacaaaagactgtttcaaaccgcttctaccattgtagcatctatcgtacatccattgacgattggaaggaatatagttcatgttctgtgtatttaagcaaaacattcatgaatcttatacataaacagtcaatagtcatttcttttgacaaatatctcagttcattatgtaaagtattgtaaaaacgcaccaatccccatttttacatatatggtaacacacatatacattttcagaagtatattaacacacacaggcacacaaacattgttgacaattaaaaacatattatgatgccctgataataccactataatacctacaataagagtcctaactgtctattcatgatgaatttttacattatgatttaatgaaagcaatggagggtgtttactcacagagctcaaatcgcccatgaatacacaaagtagagcaatgaggtgtaacccaaaaagcaaataaaaaaaaactaatgaaagacaatatcttgttgataagaaaaaatgcaaatacacaaatgataatttatattaacattgtaactatttgaactctttagtgatatatgtagttaagtacaaggtgaacaccttacctaacacagtctgacttcaagaccaaattcggcagcctgagttaccacaaaatcaacaagcctgtagcaagaaaagactgtcaattgttaagtgatggttggagcaagttaggtggaaggaagggtggccacagcctggagtagatgataatgggtaagggggatcattagaaggaaatggagggcaggtgtgtgtgtttgtgtttgtgtttaaattggaagagcatgacggtgtttgagagttggagggtgtggagaagaggttcaaggagaggagaatgatggtcaagatggaggaagacatggatgggggagataggaagatggtggaggagtactcatcaatcggaggggttttgtttgacgtagatgggatctggttttggggtagaggaaggccagacttttgctatgctcctactactctactaggttgtaatttgttggagttggggaaatagagacagagggtgacgtgcacagtgagacaaaagacaatttgtcttcaatttattgcaattgcatttgcttatatttaatatttattttaagaaccctgataatcattttgagggtctatcaaaggagaaaaaggtcaggaaaatacaaaaaacaaataatttttcctaactaaacaagaaaaacaaatggaaatggactgttatatctcacattgagcttatataggaaggttcaatcattcttatagaaggataataacatcaaagaatgcaaaatattataagtacacaaggatttgcttacctgagctaattaaattatagaatgaaaagagtaaacaccaccaagcgacgaacccacaaatatgacctgaaaaagtggcaaaccaagcattcagctaagtacacagtaaagttccaaacagtattttgccaacattctattatatatttataaaaagaataggattaggatagtatggaaacaattctatgaatttttgtaacgtgtaaacaatgctggttcataccattcagcacaacccaaattcagctttttataagagggataagcataggagaacttgtgcatcaagtgaattaaatttattagaaggaacaaacacgagtatataattgcaggtgtgtcagacaaacaaatatcagagttgttctccttagggttttctacaagcactacttgtgtgataaaaatgtttcataaaagtgtactaagtactgtgtcattgcacttgcacatggcaactctacattgagttacaaattaagcatatacaaaatgatacaaagatgtcattgaagctgtgactctcccgtgaaaaaacaaagtacagaggtttccttgtttaatttttcattgaaagaaatggctgctgtgaacgaatggataaatggttatttggaggccatattggacgtgggaagcagtgtaaaggagaagaaaaatgatgggaaggtcaacaattttgcaaagtttgaacaagagaaagatcagatagaagaaaaattgtttaatcccaccaccaagtactttgttgaagaagttgttaatagctttgatgaacatgatctttacagaacttgggttaaggttcgtctaaaattgcctccctcactctaccttgcttctttgaattttttattaagaaataccagaaaattaattagttttaatctttgttctttgccttttttattctatatgctaatatttagagggattaatgtatttgatcatctagttattattcgccaaaagaaaaagatcatctagttattaattaggttcccaaatcattgggtgaataaggatcgataaatgttgatttttttaatgaaattatacccaaattgaaacctaccaacgtagcacaacccttcgaaatagcaatttgatgaaacaaaatgtgaagaaccttcaaatttatcaatataacctagctagtataatgcaggtataatgtgttaaagcagattgatgaatacaatgtttctgaaatgtgacagcaattgaatttgcagctacaagttaccagtgtgcattatgtatacaagtatcaactgaatttaccatttatcatgttcgttgttggctaatccaaaaaaaaaaagcatcttcattgcaaaaccagaaattacattgctctttgaattttctgttttcacatttttagcccattgagtatcttttggttagattcatagggactttaagctagttgtttattataaagttgttagccttatccatcaatttttgcctatagatatgattttcacttaaattttatataattaattatattcaatcaattttacaaaagaaactaaaacatacaggtcagaaaaaaaaaaaaaaaaaaaaaaaaaaaaaaaaaaaaactcaaacctacataagccatcaattggaattgaaaacataggacccataacttattccataatcaaaaaaaaatctgacaacaattaagaacatgtcattgccaattgatagcaagctttgtggcacaattcaatcactgaagaacatttgttttggcacagagtgatgtctttcccaggtgtttttcttttctcactccacaataaatccatatgttcggaaagtttgaatataaaaaaattacaagttctttatttatgccccctcagattaaattgcatatctcagacccttgtgttgatggttttgaatatgaggttatgatgaatgagatgaaatgaattcatgttaaattataggttattcctttggcacctacaagctaagtggaggttttacttgaactggattataggttcttattagcttgcagcttgaagctatgtctacatatgctcatcaaatgaagcagcagtactcagcacctagtctctcagatgattctggtatgtagagcctacccctacaatagattaatgtttggagttcagtaattattccatgtacttaattttatgcaattatcatagtcatcaatggattaacttgtaaaaagtagtgttttggggatgacaactatgtcctccccctccaatgacaacaaaagttattgaagtcagctacatggatcacatggtgtcattcattcgacttagttaaaacttatacaaaattacatgatccaacacaaaggctacacaaagtagcatcaacaaagactaaagtttgctccactaaatgacgttaacagggaagtgccaaacatgttggtcaaatccataatcaaatatgactaactctaaatcacgttatgctttaaataactcatcttggatataggtttacaaacttattttaggagtgttgtaatatttcagaatataagttgatattgaattatctatcaggctaccacttaacatctatttagcagagcaaaagattcaggtcctaccaaagggaaagacatctctctgtgccattgcgtatgtaatcatgttcaacaaatccacttgcccaaataatgacatacatgattggttataatcaacaagttctttataaggttaaaaatagtacaagaatacaattgaaaatatgctttataatgcatccaagttaaatacagtacctctaatattgatgtgaaagggtcgtaggctgagccacctaaagcaaaacagaccactgtgatcagaagctccttaatgcccaactcttgaactgttttcttacaatacaaaaagataaaggaaaaaaaactcagcaacaatggacgcacatataaaagataaccttactaggtacttactacgagcgaaatgatgaagtaaatatagtatgagttctcaagttcacattgcaaaatacttctcaagtttattatttcacatgtagaacttaagtccaaaattatttaaatactttaataattggattaatcctatccaaagttggaagaatatggtacttcttaccacatactatgtcaatgttttgtatgttgacagccaatccttctgtgaatacttggaaacaattgcaaggagtgtagttaaagtttttgaagcaacactaatcctcgggttttaccaagttggaaagatcacagactgctaagctgaaattgtttagtaggtcagcaaagaaatagaacatactatattacaaaactagaccagtaataagaacatccacacaccttcctgtttgcttttggttgatagcattaacctgactgcgatattgttatactcacaaacacgaacttggcacaaaagacaaagtttaaagggccaaacggtaaaattaatcaacatgcaaaataaccagggatgttgtaagccaatacaatattcagaaaactaaattcacaattgagggtaagggaaaattggaaaacaattgcaaaggtgtctctcaattcatggctaaggtggatcacaataacatgtcatgtaacttaaggatttaaaatgaagtcctttaaaatttagacaacaggctgaaattaatatgacacatgatgaccagaacagacccaaagcaaaatccacaggataaagtggcccatggtatttgacattttacccaaaaaacaaaacagcagtccttgttatgttgtgcattaatttagcaatgaacctactaaatgatatcggacaaactgacgtgacgtggatctatatcaccgaaagaaagtcaaatatttattgggccacaatatacgacccaatgcagtatggttggcctgttgccccattatggaagtttgggtgttttgttacagcaaacagaagcagaatcataactcagatagtgtgcggttattagggaagaagagagaaagcgatggctaatcagggtgctaagaaacgcaagcaagagaacgctcgtcacatggcgaggcttaaggaaattatcatcacctgcaacgtactctcttcctctcttcaatttttggtgatactatggattggtgatgtaattgtatggttttcttcatatgtatggttttagaatataaggtttgtaattgttaatgttatagctttgcactgaggctacttcaaataatgcagtcttagtagatgccagccttggtggtgtgtatatagatggtccatcttgttttgtatttatacataggcttatttgtcatagataggagtactattgaagaaaaagagataatgacttctacgtaagtgcttgttgcattttgcaccataaagcaatcgatcacagttggaggtggagggactggaaggctaaagagagtaggcaccaaaatatagtgccatttttcatttaatccccccaacaaagtttgacacagttgataaataattaggtctcatgagcatgctaaccaaggtttcttggattgtggtatgcgtggaaaacactttcttaggagagacaaagttcacttcgataatctttacgtctcaaaagagattagtcttcaactgttagctaaaggatatcgtggtacacacgcacatggtaaatcacaagtaactattgttaccccgagatattagtttgttaattcatggattatattagattgggtattaggtattcatgtgcaaattcaactgtgcttggcactgcactgcaatcatctgcagtctaaatggaactgcacactattttaatatatttgttaattatttaactttcataacctacataaaattataaatctggtttaaaagttatagtctatcggatttaaaactacagtcgtgtcagttctttctgaactgcaggcctgttgggacctggactgcctaaattttgactctatgttgcccttttctgccccaaatttatttacattactgatagagtttgttgttagggtaatcagtaactgcatctgcctgacttaaagaattctgaaaccctttaagcattacaaaaagcaacaaactacagattaaatcagtgacacaattgccccttgcttggcatttgacagataccggcttttggagcatacaagtccattggtttcatgaagacataacataaaacataaaaaagaaaatcaaactacaatatggtaataacaaaatacaattatgaagtataatcattagcaacaattaaactggactcttttactaagctattgttgtcgctgttggtcatcaaagataacattatatatgtgtgtgtgtgtgtgtgtgtgtgtgtgtgtgtgtgtataaaaggaaaaagtacaagatgtacgtataaaaccttagaaaaggcccagcagctaacatgacagaactttggcatcctaatacatgaaaacattcctgaattaatatgccaaaggtcatactaatgacatgctcacacccaggccaaaacgtaaagatacagactctaagcccccctatatacaaaaaatcatctctgatattcatcgacgattggtagtacggagtactgaaacctttctctaggttaagtagccaggaccaaccgaaaaaaatgcgtcctccagcagtttagagcaattgaaactttcattatgaaagacaatcttattacggtgatgccaaatgctccaactcaaggctaaccaccaaatctgccacctatgagtcctaagaccagtaaagctgcaatacgtatgctggatgaaatggttaataggcttgatcgaggataccccttgcatattaatccattgtagtgactcccaccaaagcggcataattttaggacaactaaataacacatgtgaggtttcttcgatagaacagctacaaagagggcagctatcatcaccaatactaacattccttctaatgagattcttcttagttgggtggaggagtttagtcgcctccagcagatccaaatcagtttctatttggtggaggtacctaagcaatatttgccaatctaatgacgaggatggctggttcaataagggtgtaaagtggagggttgcctgtggagctagggtgctattctgggaagatcggtggatggaagacggtgtgcctttgaggataaagtttcctagactctacaacatttctcaacaacaacaacattacatccagaaaatggggttccacacaatagctggctgggaatggaggtttcaatggagaaggagttttatggagggagaagtagaagcaacaatcaattaacctgatgaatttcagggtttgtcaatatgtgaacaacaactacatacgtggaggtaggggtgggcatggattggatttttaagaatccaatccatatccaatccatatctacttaaatagattgaattttaaatctatatccatattttttaaaaaccaatttggatttaaaatccaatccatttaagtggatatggattggatcatatccaaataaaatccacttaattgttataatttttttttagaaattttactaattacacactaaaaagtgaaaacttaacacttgttccataattacaaaaataaaaatctgtacaaagttttttaatcttattttcatatatctcaacttatatctgtacactttcccaatcaaaattccatatatgtgacatatgtttctattctttctaacattagacataagaatgtttttttacttgacaaaaatttatcttgcatatatgtcaaaccaaatttatgttgcatgaaattttttacaatgacaatccctaagcatccacttagtaggcacaaaatcgacagattatatatggaaggatagaaatgagtaattttttgcttccttccacaatgtgaaacatgtgcctctctggactaattgtgttgtgttctgtccaattatgagtacacaaaacaaattcaaccatttcaatggtttatgttaatgaaactctttccatcaatagatcagacaaaccaaaacatagacatttacattattggcaactcaatcacaagattcagacttcaaaaatgcccccattctgtagcataaaaacaaattgataataaataacatgatctcacaaaaccggcaaagcacatcactaataatgaattacacccttaagaaaacacacagaaaaataaagtttgcaagatcagttcacatttatgataattcataaacatatatatatacacacacacacacaatctaaacagataataatattaacacaaaaacaatccacttggatttcatcagcgatactactatcccctggttgatcattcagcttacaagtcaaattacctcaataaaattaatttagtctaagctaccaaaaaggactaaccaaaaataagaagagtaatgtacatagacagctatagctactgctaccaatcatagtgcagaagaaactatcgttgttcatcacccacccctacgtggaggtggttgggggatccaattggtaagtacacggtgggaagtgcctacaacatgatatttggggtcttggatacccaggccaatgaggaagtgtacaaggacctttggaagcttttactaacctatttaatccaatctattgagctaaaggggagtacaaggtcgtacatgtttctccaatgaaactaaatgaataacataagttctggagagctagacctcatcaattggaattgcccagactcaatcagctaggtagctattttttggcttacaacttaaattagacaaccattttttcttcatgcaaaaaatagtgggtccttccataacttcatgtaaatgattttatagactatggagaattttaatattaaagagtaaagacaaagatgtaattttttgtttaaaataaattaaaaaaataaccttattttttgatttctgattaaaatgttaatgtagaaaatgtaaaagatgcttaaaacgagcacaaattttcctaataaaactaattgtcaaactagttaatgcactatataagtagaactataatgggctagaaagattctgaattccactataaggtaaaatagttagaaaatttgtatattgtgcaagttgtattgtagtgtctttttcatttttcttttcctgtgcatgactgatttttgccagcattttccaaacatattggttacattgttctcagaacctagtctttttttgaggtttttacaaggaacgtcgttattataagctgttacttatcacttacgtagttgacttcttttttgctatgtagaaaataataattgccttacatgacaagggtgataattcaagataacatttgaagattaaaagagccactattctgacaattatgtgacatgtgctacttcacaaagatatggcttaactttgctataaatatctacaagatttcattaaaaaaataagaaaaaaggagaccctcaatatgtgccatggggttgatgacccaccacagaaatggaaccttgactaggtgcttcttcttgtggctgatgcttaagattgtgcacacaaccgtttgtcccccaacatttcacattgttcctttctgatctaagtggccttttgcaatttaggttctagttacaactgtataattcattagctagagatggtgggaaagagcaatacattgagctagttttaatatcaacacaattcaatacaatattgctcaagttgcatttacaattcaccaagacatagcacttaacactgaattttggctagttctgaaacatatatatcacatcattgctgatttaagaatgatagcttgtttggaacattctcttttacagtttttaagatttgaagcataattaagggctaattccagtgaaaataaataagtttaaatgagtgcctagaaacggaagctcaaattcatacgaatattacaaaattggattcaatgatcatctcttaatagaaatctaagacatgtaatgctcagcaagtatgtcacttcaactttcaaacaagattaagacatctacattttctttcgtaccatcaaatatggtgtgtgcctcccaaaacaagaaaacatgaacctccttttttaatgctaaacaggatgtattgaattcataaatcattagatactttttatgaatgtcaactaagttaacaaaaatttttatcataactctctagccttttggaaaaaattcacaattgatcccatctgccattaatatgtacagtacaacactgatatatatgttctaccatatgaagggaaggacagggtcaggatcaacgagtaaaaataatgcacaaagcttcacaaatgttactttatttttaatctaccattaactatacaaattgcataattaattaggtggatgaagatttagttgtcagggaagcctttcataattaaatgagattttggataacaaacaaaaagaatcatgatggaggacatttacaaacactgcagaatagggccaaaaatgttatgaggttttgtttgtcaccaactgtgtggcacctctgttagtacaacccgttgtttttcacatctggtatgtagttggtactgagtcagctaaggcttgcattagatcaacatttaacaatatagcattatgactaacctacctaccacaatgggaaatgtattttggaaactcttatttcaataataatattttcttaatataatatttcaactgataattttggaaatgtagtcctcatttttcagttactaccttactcaagttgtacaaaatctaaaaaaacaatacatgggtttgcatccaaatttaacataactttcatttattttttaaataaattagtatacttttcatgagattttctttttttgaatttcttttttaaacatgccttcaaaaaacaatgcttgttgatggtttgctttgcgcatgcttaacagaaacagattttacagttcttcaaggacctgagaggttgaaaatttgaaggtagtgaaccttgcaagttcattgacttgaggtttatctcaaccacctctccttgtaagttgcagtgcaccccaaacctttttctgaggtttatctaaagtactgtttaaactattcttccatgctaatagagcgtggccttgctcattaagggagtaacaacatggaaacaaaaaagactttaataagagaagcaaggtgagggagaagattttgggagaaagtgacagattccataagatgacaggcattgctgtgagagaagagaagtggtgatctgttttgggattgtagagggggaaattctattattttattttatagaggaagggaagaagttctggacagaagagccagcttccttgttcttttattgttgtaataagctcctgttcaatgacaaggacatctctatacccatgatgatgtttgttggtttttattaagcaaaactctctttttaattatttatttttggatgaacccaggatatctcccgttgagaattgagaactaatcctccaaatactgaaattcatttacgaactaataaaaaagggacatagttatctgtcaatcatactacattatgttggtaaactcctcttttttgttggttcgttgtggttaacctgtcaaatagtgagttgaaattttgtgaaatttgcaatctgaatgtaatccaatttgttagttcctattagatagtgtttcactaacagtgaactgagagacatgacactggtggagggtgaaaatcatgtaaagaagattttgcatttttgttccccacatggacacatatattatcttgtgtcctgctttaatttggtaataataattacttttcatcttcatatatttattcagctgttgagattagcagcaaacaacgcatggctaagtaagcactagggctagtaaaatatagaacggaaaatgactttagcacttttttgaaattggttattaatgtaattatcttaccttgctctagatagtagatagtgatggatgattaatcaaacagaatagacagtttgatggttgagtgtagtagctctttgttcggttaatcaaagagataatttcttcctttaattagctaggcccatcttgtggtccatcgctttgtgtggctgcagtttttgatgagcaattgatgtggtggttgctacatgctaccctttaaatttctgaactttaagcaactaaattgcatatttggatcaaataatcaagaatgcaacaaaagggtgtgtttccactgtctaaatctaacagcaccaaatttctcatttaactatcttacattaacatataaagctaatctcgtagccttcttcccaatagcaacacaatctgctaaatgactctcattaaaaagggttattgcatatcaaatgaagttttttatctcagattataaatcacactgatttcaactcattctaacatctgcagtccaaatgtgtgtggatagtttgcagtcccaaatgcagaaaccaatacaaatcataattataatttaaataataatatataactaacactaattggatgatgaactcaaactgatgacagatcaagcttcacaaattatttaaaacaattaacttgaaataccttcactccacaaagtatagcttcgttacggatcaagccaatcaatggtgggctgcttagatgggttccttttgtcaacaagtcactttctattggagcaccaattgcattagctccatcccagagactgataacaaccagggaaaggaaataagaacaataacatgtatcagtctacagaaaaaatagagaaataaagcgcacctggtcgtggttgtgtgctgttgtcgtcgcggtgcttggtggtctgcgtttctgaatcgccggagacagaggaagaagaaaccacaggttcagccttgcgggagtgcggtgcggtgacggaggaacaagacgcgtgcgaagcttatggttgtttcagttgcggcggcggcgacacacaaaaggggggaagcaagaggatttcacgaaagaatttcaattttgcattcaattagggttgggacttttgtgttccgtatgaattaaatttccgacgggcataaaggcaatctgaaacatccgcgggaaaccccaattttttctaccaaatgaccattgtcggtatggtccgtgagtaagccttccatttccgacggaattgcagtggccggaaatgggccgtcgaaaatccgcgcttttcttgtagtggttatgtttggtgaaactaattagaagttgaaaagttaactaataattgaaaattggatattaatagttggaaattgaaaagctagcttgttaaattataagtgttcgataaaattagctattgtaatagttgaaaagtataaaatagttgaaaagtaaaaaaaaatgatttattttaaaaaaataatcaaaaaaatggataaatatgttgatgataaaaatagaataaaatataaaaaaaatagaagataacattttaaaaaaaattacttaaattaatattttaggaaatggtagaaactattaaaaaaatatttgtttaactaatgaacaaagttaaaaactagttgaaataatttgttcaacatagtctaaataattaaaaaaaaaatacaacatgaaatctaattcagacaattgttgagaaattggttcagatttatttaaataataataattattattattatttaacttaaatgaatttgaaatatcaaccatttttataaaggaaaatcacgtgaattggaacgtttttttcttcgaagttttatttggtacatataatatatccacgataggggaaattatactagaaatatatctctcaataaaaaaatataaatatagaaattattaattaaaaatgttttcacaataactatttgagtgtagaaaataatataataaaatcttagttaattaaagttataaaaaagacctgttcaaagttacgttaattttgttgtcaacaaaaaagttacatttattttcatattcaacatcatttaattaatttgatttacttcctttaataagtaaataaaattataaaaaaactataaattggaaagaaaaaacatttatttttataatatatagtttttataatgcatttatatttgtatttataattagtagagaggagagagaaattaaaattttaattcgaataagacagaagagagaagagtaagtttgaaaatttaataggagagataatttttttaaacttaattataattaatatagtatccttaaattagtttgactaaaacaaatgagcttgttttctttttacattttttaagttaaatgataaagtatgataatatttttaaattaaatttttgagaaataaaaaattcaatgattttttagtctatttttttgtgttaaatggtctgaccatctagtcaaagcagtttttattttagttaggctttgaccatccttaagaatatatatatatatatataataattaaaccatgtagttagttacatgttggttgcctctcaatatatatagggttctcaattttggttttctgtcctcacaaattaagcggcatagagatagagaatcatggatactaaacaaacacttagaagtttggcgatgataatattactcttagctgggattattttggtgtaccactggacctcttccttctccaaccaattcgttctaactctaaaggaaccactttacaagcaatcaaattttgtaagttcaaatcacccatattttacattttgcatcaaaacaaaatcatgggaaatctttatatatctagctagtttaaattttcaatccttatatatataatcaaaagagaaataatgttgcattgccatatattacttttatttcattttgtatcaagtatatttatagttttttttcttctttttagctataatttttcatcattttaagtttcctctaatttgtgcatacattatagaccactcccaatattgaagcaaatggagatgaccttgacactgctctggccaaagcctccatgggaaacaaaacagtgataattgctatagtaaataaggcctatgttgatcaagatgtaaagagtgacaccactatgcttgatatatttcttggtagtttttggcttggagagggaacaaggtctctcattgatcaccttctcttggtagcggttgatcaaacagcctatgatcgatgtcaatttctgaagttgaattgcttcaaattggaaacagatggggttgattttaaaggtgagaaaatatacatgtctcaagatttcatcaagatgatgtggaaaaggactttcttccttttggaggttctcaaacgtggctacaattttgttttcacggtacgtatttccctcttttttttccatctttcttctattttttttcagttgattactctttctcatgtttaagtgcatagaatgtatcggtggtctaatctaaaattagcttactttttctctctcttctctcttttgaacttatatttcacacattacttttttttacagataacatttcacacagaacttgccaactaactaacaaactatcaagctatcatttatatatatatatatatatatcatattttatctttatctataaataaaatttcaacaaatttttaaaaataatttctaatagtgaaaataaaatttatatgacagtttaaattattcattataaattttaaatataatctatatatttaaattatagattataaatttatatatgagatatatattatttatgaaaaatttaattatataaaaataaaaagtttatcctataaattatacagaataaactataaagtactaaataagacaaaaatagcaatattaacgagatttggggtaaaagaaatagattaatctcttacaaaattataaacctcaacttgaatcagtagttggattgacaaccaatctcaaataaataaaaacaatataaaatacttagggtgtatttgatctattacctgattaattcatggggtaaaaaaattaattaaattacaaactaatttggatttatacttgctttccaatgtttactttattataagattcaaaaatctgaaatttatattttcaccctacgcatattactaaattgtaaatttgtattttatactgttattaagtaatatgcatgatatgattattatggtagagagaaggacattttttttttattaaatacgacctgtcatgattgattataagacctattaagcactaactatatttgataaaggtctcaaatccttaaatttccttgtgattatagttgtacataatatgtttatatatatacacacatgccaacaattatgaaaaaggtattttcaacttctcttcctaaagcagtaaaaaacaaacttttctttctaaaaaaagttcaacttctcatataaaattaaattgaatagttgaatatgaaagtatatcatcaatttaactttacaacatttatccccttgatctaattcaaatgcaacatattttcataggacactgatgtaatgtggttgagaaacccatttataaggttgagtaagaatgagacagaagacctccaaatcagcacagatgcataccttggtgatccttggttagaaaaacatccaatcaacactggattttactttgttaggtcaaacaacaagaccatttccctatttgaaacatggtatggccaaaaggataaagccatagcaaaaaaagagcaagatgttctttttgacctcattaaaagtggtataattaaagacttgggacttagggttaggtttttaaacaccctttatttcagtggattttgccaagatagcaaagattttagggaagtcatcacagttcatgccaactgttgtaggagtatcactgcaaaggaggtagatttaaaggcagttcttcgtgattggaagcaatttaggaagttggaggctaattctacgataaatactcgttggactatgcacaatcaatgtcgacaatcttggggaagacctttaaaagtaaagggttaagcatcatggttcatatttacataattgaatcatgatatccgacatgattcacatttttttttatattttttatttatttgtgggaatcaaaaatattatcaaacaatttacaataattcacatactatattcaatcaaatgagttaaacattttttactttatatatataatttaaacaaacatttcttttaatttggaaaagtaaaaatttgaattatttttctctgtgcactaaatatgaaaagataaaatttaatacatgttctttttttcccgtagaaattgaagagatgtgataaaaaaatctttatgttcttgcatgtgttttaaaaatatacatatgcaagtaaaattactctcatttttaaggctcggttagtttttttttttttcaatttcaaaattattaaaaactaaactcggtttatgttttgagttttcaatttcagtttatttttaattaatttttaaaaagttgttgtaaattaataatagataaaataagtcaaattttctatcttatcttgctccattatgagatcatgttatacactggcggatccacataggattgagggtgggcagatgtaccccctcatttcaataaaatcactaatatacataggattaagggtgggcagatgcaccccctcatttcaataaaatcactaatattttttctaaaatattatattttacatctcataattttatattttgcaccctctaattttatgtatttgaacctcattaccaattcacatataagagtaagtaaatacaccattttattttaataaaatgcaaaaaaaatattatatttaaaccccataattttatattttgaaccccctaattttatgtatttgaacctccttaccagttcacatgtaagagtaagtaaattcaccatcttattttaataaaatgcaaatatttatcttaaaactttatattttgtacctcttatcttcgtgtttgaatccaactatccatatgataatgataattatcaatttttattttttaaataaattgcctccactgatccagggtcctagatccgtcactaatgttatataaaaaaatatattggcgcaaaaaaattaaaacattctaaaaataatataaaaaattctacaaaaaatgttaagactaaaaaaataacaaataatgacatactatatatagtttgcatatatatatatatatatatatatatatgtatgtataaattgtttttctagttttttttacatatatatagtttgcattatgtaacaatatatgtattttatattcttttttagttgttatgtatatttcttattattatattatttagaaatttagttattaatttattatatcacaaattatgttttatttaattattattgatattattattattagtatttaattctatgtcatgtttcttcagaagaagaaaaattgtatgttatgttttacttaagaaaaagaaagctataggactgaaattgaggcccaaaaaatcaaaacagataagagagagagagagagagagagaaaaaaacaccctgaaatgaaacacgacccagcccactgtccgtcgacgacgcaaacgaagtggcagctgcgaaacccattgagacgcgcaaaaggcagcaatctcagcgtgaacgagagagcggcgtcgagaggtctccacgtgaacatgaaagggtttttgagatttggtaaaactaacaacaaaattcaacaatccaattttaattgttttttaaataaggataaaactgttttaaaaacaagtaaaaaatcaattcaatcataattttaccaaatacgttgtcgtttaaaattatatcgtaaaattgaaaatcgaaaacttaaaccaatacttaaaaaattactgtaaatctcataccataaattgaccatcccttatattatctcaaaatcagtgaaataattgagataaatattattcatttaaattatatgaatattatttattatacatattattttatcttatattcttaattatatttaaaaataaaacttaacagggctcataaattttctttttgtaaaaaataaatttatctaatttaatattatattattatcttaatattattatttaaatattttaatttaaaaaattgattgccaaactattttttttacttttattgtaacaaaataaaatgtggataacttttattttaattatccccaaagcaatcaaagtatgcttcatttgtctccaatgtaatcaaaacatccatgttgggagagccaaggcgtaacgctttgtagaatcatagcaacctgggtaaaaaaatattataaggttgatttgtgaagagagaaaagagaaaaaagagagaaaaaaggacataagttggaattctttattaacaaaagttaatcatttacaactaatattttcaaattaataaaaggtaataagaaaattaaataaatattttaaaaataaaagataataaaatataaaaatgtaaaaactaacgttttaaaaatcgttagaatctacttaaaaaatatatatttatcaaatagtcaaacaaatttttcagctggtaaaaaaaattaaaattgattaaaatgacatagtaaacataacctaagtctcacaaaagatgtagtaagactctaacaggcatcatattccacaatacaaaaaatctaagagaaaccattgtaaaaaagagtctaaaaaaaatactgtgaggaacaacgaagaagacgttggctggttcaagtttgaaggtgaggctgatttgtgtgatgatgacaaaaaatggtgattcaacgatgttgatggacgaaggttgcttcgacttcaacaactaacaatattgtgagacaaaccaagggagcatgaaccgaattgcgaaccagtgacaccaacactggcgtactcgataacatgaagacaatgtcatgcaaaagggagaaaacagaaacacaaaaaagaagacaaactgtatttgtacatgagaggttattgattttaaaaaggaatttttattatctaatcttttaattttatttttgttctgcccttcaagaacaaatgtccagcaacaatgccagatgattgatataggatcaaactctctctctctgaagatgcttatggtgataaaacacctccaggaagaagatcacaacactcacaagacaaaccacaattagatgtggggtgtgtgcactgtgagaatggaaaagagagagtcagaatgtgtgtaccttgtttcttgttaatgcctctatttatattcactgacctgtgttaaaagagggaatttctccctattcttggcttgaatcttcaatcagatgagcatatatcttccttatttaccatgaagatattgtcgattatttctcttgattctggcagttaattagaatatgtgttgctctgaaccttgccggaaatcacggcagactgatgatcaaatatcctaacttgatcttgttgggcctcttaaggtttggcccattctgaatattcgtaatagttgcccctcagcccggtcaccaagtatactgggcgaccaggatgataatacttgttggacagttgccgggacagtttattcggcttgactctggccgagtttggcgaattccgtcattcgcttttacttgaccgagttgccgagtttcgctttacttgaccgagttgccgagttccgacattcgcttcacttggccgagtggccgagttccaacattcgctatgaatctgttgctatcttggcgtagtccttacggtgttcatgtattttctttgacgcagcctacctatcctcctgacctctgaccttgttgggaaaatgaaacgttctcattatcacttagacatgtgaaacgacgcgcccccgatcatttaatgctctgtcctttctttgcacattacaatcataagtattttgactcaatttccattttgcccctgctttatggttagccgggcatttttgcccctctggcgagttgctttcgtcagttacctgcccccagcggttcgcatttcgacggttactcctcaactttataggcctcgacggttactcttcacttttataggccttaccttgtcatttctccccacttactttcagaatccactgattattttcttccccctgcctatcctcacatcagaccttcatccttcgctcttcaactttggtgccacagcccttcctttccagattccttctgttctaggtaccttgccttcccttcctttttgtgtttttaggattttcgcttttctgcttttcatcattgtgctggttgcaatctattttggtttttctatgctcctttcttcttagtccaccttctgggtttcgttttcttccttccatttctgtttcttttcagtctccctttttttgttctgttccccctcattcagtgttttggttttttggtcttcctctttcagaggaagagaaagccaaatgtctattgcgcacccctgctggaggttccaaaccctccaaaaaccctttagccaaaaaaccctcctctttgaaggttataacaagctctggtgttgagtctcctggtaagcctcggggtccctctgcgatcccttccggcattcccttagctcaagttcctgtagggcctcctcctgagattcggtttgaaccatgtccgaggtgcctggagagattcttatacctggctagctcaggttttgacaaacaggcccacgacaccctggacgcgtgtcggcataaccctgtagtcatttccccccatgcccgtgaggaccggggtgtcggtgaccgaggttccgcccttgcgtattgctaccccagcgtcggttaacacttcgtcaaaccttgctgctgttactccaggtactcttactgattattgtctttttattttgtcataggttataatggacgtccctccagtggaaatagtcgaagaatccctgtcgaccggatcccagaccgacaacccctctcctcatataatagctaaatttccctgggtcacctgaggttcttaacacctcatccgttatgagtccggagagtgtcgccgctctccctatcgggaaccaagaagggttctcgattcgccatcccgaccccaataagccgatctgttcatgtgccgaacaaggcgaattcaattttttctttttctgtaaggaggtggttactcgtttgggtacccgatttcgtcttttcgagttcgagatgaagctcctaaagcatctgtctttagccccttcccaacttcacccaaacggttgggcttttataaagtcttttgaagacttatgtataaatttggaaatcccctacacggtccccatctttatgtattatttttctgtccatactggttgcaccggccgagaaccttccgatcggaaagggtggacttccttgaggagtcgtcccaaatgtaagctacttcccctttttaccgagtctttcaaaaaattcaaaaacaactatttcaaagtttgtgcaaaacctggccaacaaccttttttcctccaagggccggagtctgtcggggtaaagtggaagtttccgctttactagactcgtgctcatcatgaattttcccccattttctaccagcgtgaggagacgggtttgtcggatgaggatgtcttttcaatgattcgaattaacgctttccgagaggctcatggcctttgcgatattgtccctcctcttcgtcaacgttagttcaaaattccgataatggtgtatgtaactttttgtttcttgtctgaactgtttctttttgctttgcagcaattgagatggaagatcaatccggagatttgaggcctcgttctcgcaaagcttccggcccctccaggccgacttttggcgccaacgaagttcctcccttcctctccaagatcaagaagagaaaggttgcgaagtcagtcccgggcacgactgtcgaagtgttggtctcgactgaccctgtccatgccccggtcgtcgtcgctgctgtcgccgctcctcctagcgtgtcggcccttgatcttccagccgtggaaactccttcggctgtgctccctgaagcgctgaagctaacgcccgggtatctctgggaaaagggtactgaagacctctttccctttgtccaggctccgaggcatttatctgactcgactccaatgtcagacgaaacgatgagggagctcagccagatgcaactccacggataccagactgtttctctagttgatagtctagtcactttaaagaatagatatgtcaaaagccaagaggagttggctgctgcccaggccgagtccaaggaagtcgacgaggaactgcggcttgctcgagaggagttgcggctagctcgagagaagtttgagtgcggtctccgggatgcccataacgagacccagtaggcctcagccaaggccgccctgatgaccgaaaatctgaatgaggtcaagactttatttgaggtggctcaagcagaggctaaggaagctgagtcaaaatttttggatgcgaagaaggaggcggccgagctgcgagatatgatgtcgtcggtagccgaagactccttcaacaacgccttggcacaggtccgacgccttaacggcggaatcactctgaatactgaagggttgcactttcaatcatttgttcgtgatggtgcaatcgtcccttactacgagcaagaggattctatcattgaggctggggacgttcccgaggccggcgttgaagagacctcggctcctgctggcgatatttgaaggactgggatgccgatttactttgtacttttctgcttttttcttactttcgaacaatttgctattttcaaacaattgaagcacaattgatttctataatattatgttcttttagaactgtttgtatgcgcattagatattcgtttggctccaacggccaagtatgatattgtccgaattacgcgatggttctcggttctcggcttttatcccaagtcgtcgttagtgtaacacggccactgaagaccatgccaacctgatcagggtttggaaacacctcggattcgcttgggacgatatataataaaatattgctctttgaaggaatgtcaattcatgacttgtttattcataaatatcgaatttatttgtatctatgatcccgatgaaagagattacacgaagtggggatgtcgagacactcggctcccactcctctcaattaacgggaaacacatagataataacaccactgtttcatatgtgaagattgcacattcacagctaactataatatgtcttcaatttgtcggcatttcatgtgcacttgactgcctttttatccagcgtttccaatacgtatgccccttggccgaggttctgagtaactcggtatgggccttcctagttggctgccagcttcccatcccgggagttcttgtttccaatgtcggcccttcgtaagactaagtcaccctccttgaaggttcttggtctgactttcttgttgaatcttctggccatgagctgttttgcggcaacatcccgaaagtgcgctttggctcgggtttcatctatcaactcaagctcgttgaccaacacctcattgtttgcgtcctctccttccttgagtatagtcttccttctccaagagggttgtctgacctctaccggtatcatggcctcacacccgtaggtcattctaaaagggatttcttgagtggatgactgggtcgtggtcctgtctgcccataggacatagtacaactgttctacccagttattcccggcgttgtgcattcgtttcctgaggccctccagaatgactttattcgccgcctcggcctgaccgttggactgcggatgttccacggaagagaagtgatgtttgatatggagaccggacatcatctctctgaacttcttatcagtgaactaggttccgttatccgtaacgatttttgtcgggatcccgaatctggaaatgatgtttcatttgaagaacttctggactcgagccgaggtaatggtagccaacggttccacttttatccacttagtgaagtagtcaacggctacaacaagccacttcagctgtccctctgtcgccttaaagggtcccaagagatccatcccccatttgtaaaagggccaggggatgtgatagctgtcagctcagatggagaggaccatattattctggcatgcctctgacagctttcacatttcttcacatgaccctggacgtctgccttcatagtctgccaaaagtatcccgcccgaatagctttcattgccaaagctttagctcccatatgctggccgttgatgccctcatgtatctcgttcataatgtattctgtctggttgggccctacgcaaagtaacatgggattatgtgggcctttgcgatacagctcaccttcctgcgtagtatacagggcggtatctcggaccaacttcctagcttccgtagcgtcatctggaattactccttgctctaagtatttgactatgggctgcctccaatccgccgccgtcgagatcatcatgatgcaagtggggtaagccagctcctgttggacaactgttctatggttacctgtgcccttagtacttgctagcttggacaatatatcggccctcgtgttttcttctctgggaatgtgggatataacaacttcatcgaactcggcaattatctccctgaccctggccagatatttgatcaataaaggtcctttagcctgtatcttccttcaatctgggctgcgacgagttaggaatctgtaaaaacttttagtttctgggctccttgctctctagctgaagccaatccgactattaaggcttcgtattcggcctgattgtttgacgtcgagaaattgagccgcagagattgctcaacggatactccctgggggctctctattatgatctcagctccacttccctttgcgttggatgacccatccacgtaaagcgtccaggcttcctcgtttgccgatgtcaatggagtgaggccaaccaggaagtcggccaatgcctgggatttgattgcatgtcgggcttcatattttaaatcgaatttagagagctggattgcccagttcatcattctccctgccaaatccggctcttgcaagatttgtcggatcggttggttggtgcacattatgatggtgtgaccctggaagtatggatgcagtcttttagcagccaccagaagtgcaaacgccactttttccagcttttgatatctcaactccaaatactttagggcctggcttacgaaatatactggcagttgggacttgccggtttctctaatcagtacgacgcttaccacttcctcacctactgaaaggtacaatatcagtatctcgtcgggctatggcttggataatactggaggggaggcgaggcatttcttgatctccttgaaagcgggcaaaaaccttattcatcatttgctggtaggtggccccgacatttttcaaactgaaaggcatcacgttataacagtaatttgtctcgcctcctctgaatgtcattttttctcggtcttcaggatacctgggaatctgattgtatccggaataggcatccatgaatgacaataacttgaacctggaagaattgtcgaccaactgatctatgctcggcattggatatgaatctttgagacagaccttgttaacatcggtgtagtcaacgcacacccaccatttgctgctggatttcttgaccatcaccacattgcatagccacgtcgtgtattggatctcccgtatgaagccggcctctaacaactcctggatgtgcttttccaatgcttgcctccgttcaggtccgagatttctctttttctgggccactggtttagcaccgggatacattgacaacttgtgacaacataaagttggtcttatccccaggatttcagaggttgtccatgcgaaaacgtctcggttatctctgagacatttcgttaactctgcccttgcaaccgggtcagttatcttcccaaccttggtgacttgggcagcttgagaacctatctggacttccatgagcttgtctgctggttcaagcctccattcctccacatcctctctgacgtcgagctccatcaaatttatgggttccacctactgctttctatccgtcctcgagtctaactcttctctgccctcttgacgctgctggggtgatgaggggccgacttcgtatcctcttacagcattgaagtagcattggcgagactccttctgatccccacaaatggtcattaccttaccattgctccctatcaacttcattttctggtgtttagtggacatcaaaatgtctcacctatggagcgttggtcttccgagaatcacattatacggatatgggaactcggccacgacaaatttcactctttctgatttgaaagcttcctttgttcccagcgtaagccgcagctcaatggagcctttgagccctgtattttcgccgttgaaacctgataacaccgtttgacacggtttcaggtcttcttcgtccaaattcatctttttgaaggtagtccaagatatgatgtcggcagagctgtcattatccacaaacattcttctgactcggcaattggctatagtcccggttatgactaggccgtcctcatgcccaggaatcacgtcctccatatcctcattagtaaaatagagcaggagaagctcggctttgtcattggggcctttgaacctgggttgctccctcacagcaaggacctctctgaggtatttccggcgttgattagccgtatcacctcctcctctcatagctccagaaatgacattgcattcaaattctggttctggaaactcctcgtcctcctgtttctttcttttttcaccttggccctttcgatcgtcattcgggttgcctttacgtttgccctgctgcccttgggttttgatcacatattgctgcaacttgccttcccggatgaacttctctatagcgtctcgcaaatcccagcattggtcggtagtatggcccggcccattgtgaaactcgcaaaaatgagtatagtcaagaccgacctttttaaacacaggccgaggtcaatccaccttcttcatctccgtcagagctacctctctccatacttgtgctcgggaaatgttcagcggggtatatctgtcatatttggtgtcataccgccccgacctgggaccgacatcgttatttttgttgggctgcacattcccggggtgctagcgatgcttcggaggtgatcctttccttttggggggcagtattagcaatctctatctgctccaactccagatatttcttcgatcgaaccctgaattccagcagcgttttcaccgggtccttataaatagattttgccagccgcgatgatctgctgagcccgaccgacagtaagtggacgtataccttttcctccaagctctgtacttgcaaggcagcctccttaaactgatccaaataactctgcagcgttcccccgggtgttgacggatcttccccaaaacaaactcagacttgggctgtttcttactcgttgcaaaattgagcaagaacctctgaccaaaatcctcaaaattacggatcgatcggggtggcagtgagtggaaccacgtctgtgccgcacagtcagagtggtaacgaaaatccgagagattattggctcatcaatccccggacgcacatctgcatatcgaactcgtcaatatgcacctgcaaatcgtgacttccatcgtacttcgagaggaaagacccatcaaaatctttgataaactgggcgttaacaatctcgtccacaaacggactgttgttgtgctgtcctcgtcgatattttcttctatacacctcaacccctcctctggcttgataggccgggctctgtagtgcgtttgtcggactttttctggtttcgacggcttggcccgggatctcagctctgaggggcacattgtgcggttcagggttggcctctcgtgcatgtcggtgagaagctgctcctggctcaaaatgaacattctgccccggtatgctggcctcggcattatgcaccgggctgggatggaatgtctgctcctgggaagggatctccatgtgactgatgcgctgctccatttgctgtagtcggtgttcctcgtcgtgtctccatctcgcacaacgctcgtctagttgtgcaatcatgttgttcatatcttcctgtcgttgaagggtgtgtcgcctctcgaatcgttcgatccgggatagaatggactgcaatgcattgttggtgaagcgctgcactgattctttctccacctcggccggcgtgggcagtggattctctgaaacagcaggcgcgggaagtgggttattttgtgttcgtgatgacgcagtgtccgaaaatgcgtcttccacccggactgaatgcgatcttctgtgcacgggtgggtcttcatgctggtgtcttctcgtgtttaccatggtgggagtcgaaatttaacgttccccaccgacggcacctatgttctgtccttcaagaacagatgtccagcaacaatgtcggatgcttgatataggatcaaactctctctctctgaagatgcttatggtgataaaacacctccaggaagaagatcacaacactcacaagacaaaccacaattggacgtggggtgtgtgcattgtgagaatggaaaagagagagtcagaatgtgtgtaccttgtttcttgttaatgcctctatttatattcactgacctgtgttaaaagagggaattcctccctattcttggcttaaatcttcaatcagatgagcatatatcttcattatttaccatgaagatattgacgattatttctcttgattctggcagttaattagaatatgtgttgctctgaaccttgccgaaaatcacgacagactgatgatcaaatatcctaacttgatcttgttgggcctcttaaggtttgcccattctgaatatccgtaacaatttttaaattgtttgagagagaaaacacataagtgtttgtgtccaacagtctgagccatgttcatcgctacatgtgcaattatttgaaccttgttacttgtgtgttcaagcacaaaaaaagaaaacaagtataggccaaacccttaaaaaaaggcctttgactagtaaaaagatcaggctcaggccttgtactttagactaagatcgaactaaggcctaacaaaattaagcttaccttgacctatttctagccattagttttttttttaaccctccgattcatcaagggaaatgatcttaactattctaaagttcaactgagagataagtaaaatttagtcaataattattttcaccaataatcaaattcaagtagtatccaaacgattcaatattaacttcaacatattaactatgtgtgcctaatcatttggttgaccattaatttacttttttttattattacacaattcttttcacaatttatttacaattaattatgaatgaatcaaacacttaaataatacacaaagttgtaataaatatacttattatttaaatgaaattttaaaactgttcttaattccaactttttaattataaaacaaaaattacttatacgatatatttcacttatttatttatttcattttttaaatgtcagaggagatagtttgtaaaaaaatgatgcaaattagagttcaaaatttagaaataattaaattaaagttgatatatttaaaattgttttgtattaaatgattaatttagaaaaaaattattaattaaattaaatgtcttttaaaactgtttttcgtatatcttttaattcaaaagatgcttatacaatattttatatacttagattaaattttaattcaaaagtaattattcgctattctatcgagagtgctaattttattttggagaaacgctaaaggctcatacagatttagccaaattataagccagtcgatccaatccagttaaaatgtgacatctatcaaccaattatatataaaatagtatttgactttaacttttaaagttttattctttttctaactttatcctcctttttattctctttcttcaaaacatgtaccgcagcaacggtggggcgcatgtggatgtttggcttggtggattctaaggtgaagccgtgtaattagggacttatgcgtgaatcacctttttttacatgtgataacaggtaatttatcggaagaaaaaattttaaaaaaaataaacaacacacacaaaaaaattatattttaatagagaaagattaccggtttattaagttacaggtttgaaattaaaaacaggttacttgttgaaccggtagaaaaatttaattcatttatatttttttatgataaaaaatctattttttacgataaaatttttttttagtaatctctgccacaactcccaccaccaccatcacgccaacaacctgcatgtgccgtcgctgccactctcggatcagtttttctttgttctttgtcatctgtgtctcttcttccaccttcactactgttcatacaccaatgagttttctggatttttttctgatccactccactcgccgaccccctaccaccagtccaccaccattctacagttgttttcttcattttaatttgttttcttcattttaatttctcaattccttctaaattttaatctttttttttcaattttctccagaaaaatgcaatgaacagtagagggaaaatgaaagcagtagaagaggggcagcggcggtggaaggttacgactttgaagtcgtaatactttttacgacttcatttgttttttatgttacttttaaatttttaacttttttatgttcattttttaaaaaccttattttattaatttttcattttctaaaactttttatatattttttaacttgtttttttgaatttatttaatttcatttaatattagaatattattttaaatgcttttattaaatagattttaatattattttatttaatatagtttataaatttttgatatatttttatgtattattttatttaatatatttttatatttttgtttactttagaatattctatttaaatattatataaaatttaaaaaaattaagtttgaaaattgtcctcagaagttgtagggttttataggactttaaactatttttttacttttataattattaacacaaaatcatttataattattaaaacttaataaattaaataaccaaaaaattataattataaaacaattatgaaattaataaatataataaatcaattaaattaatatatatatgggtaattaaaatatttaataaattcattaagatatattttatatatatatatatatatatatatgtatatggatattagaaaatattattactagcatatatttgtttaatttattaaatgattttgtttaggaaatgttaataatataatcttataaataattattttataaataatattcaattaaaaaattcattaacaaaataaaatataattatatattttttaaaaatgtttaaaatttaatattaataaaattacttaaaaaaaagtaatataaaacaaagtttaaaaatgtttactactttaaagtcgtaaagtggattacgactttaactttaagcaaattacttgacgcagccccctttttcataagttactatgtttaatttttttcattttttattattatttttttcctcccggttagagtcggggctccggtggggacggcggcagtggtgttttccgccgtagcttcatcttattttgaaaatatattttgatttaataccggttaccttccctctcatcaactcttctccaccacccaccgttcattttttgcttctgccggatactgcttttcttttttctttcgttctcaatatattttgcttctgccggagtggttttctgtttctagtttcaaaattattaaagattaaatccagattaagttttgagtcaaccttatcagtaaaacaaaaaaatggagagccagagcagcggcgcggcacaagaaagagggagagcggcgtaaagttcaaactgaaaaagaaaggggttttttcattgttcagatttgttttgctaaaaaggggcttggaaattctaagaatagtgggacaaatagtcaaatagtaaggtgaattactaaaagggtaagtgttattttgagatgaagtgaacggagatgatctgcagtatcgaggttgttcaaagatgtgggtgcagaactatagaaactgggaagaaagagaaaaaaaaacaaaaaaaattattttttatttaatttttaatttttaattttttccggttacaaacctgttatcacaggtaaaatttgggaattcaccggtgagtccctaattgcacggcttgaccttagaatccaccgtttggcttggctagagataatgtgaaaaatgttagtgttgagttacggactttgtttatgatagagggagtcatggtctttcaaactttttgaaaatttacaaatatacattatataatatatatacttaaagtgataaaaagttttttttatttaatgtcacttttcatttattatatttttcaattatttcattttaatatattaaattttaaaaaaattattttgattctttatgtttttgaaatatattattttaatcttttttcaatttttcgttagaaatatcagtgttctgttaatttttaaatttttttaaaaaattaaaataatatatttcaaaaacataaaagactaaaatgaaacttttttaaacttaatgtactaaagcaaaataactgtgaaacatactaaaaaaagtgaaattaagtcctttaaaataattaactttacatagtgatgactaaaaatcgtcattatctttcttttatttttttaaaaataaacaactaaaaaaatcatcatctcctataaccaagtcgggcaaggagaaacaatgcaaagagggaccgaacggtgtgtttattagaagatgattatggttgacctgaccggtcaaacctcatccacaacgggctttgtcagtcttcttcgccttcatcaacacattgttgtcgacaacgatgatgagacagttgttgtcgttaggtgaggccgcaattccgacggtgtagggaggttgcgatgaagacgaaaacgaggacatggaaacggtatttttaggtcagtggctagaggtagagcaacagaaggagaaaaggctcttacccattgtgattgtgaataattggtgaatgatattattatcgtgattaaatgaataacaataatatgggactaaaggttgttgttatacatggtttcaaatccatcttttctttatttacttaatgatttttaattttaaaataaaaatattttgacgtttttagccgctattatgttaacttattcttttaaatttaaaacattgatagacactaaggtttctaatgaaaaatttgaaaaaaaaatgatacatttagaaaacataaagggcaaaaatgaaactttaaaaacataatgtactaaaacgaaacaaatgtcaaacataatggactaaaaataacattaaaccattttaaaatttaaaagttaacataacactaatgtttctaacggaaaatttaaaaattgaccaaaataatacatttcgaaaatataaaaaaccaaaaataaatatttaaaatttaatataccaaaataaaataactacaaaacatattagacaaaaaaaaataacattaattcaaaagtttgtaattatataacacatacatttataatgtatgactttcggttagatttggtcgccaaatgttttggtaattcggacttggaggctgctaggagtatttcattgttttattctgtatatattatttttttaagagattcagtatatatgttgtagtggcttttatttggaattatatatatatatatatatatatatatatataaaatataatttattaacaaaaagaataatggaaaagcttcttatacaatcacacaaacatattctctttcatctttaatttatattttgttaagcaattagatattgaaaaatgtattcacagtttaattaagcaaataaattgttttatcaaaataatattttaacattaaaacgtatttaattaaatatttaattcacatacattttaaatgctttaaaattttaaaatcccttatccaaccactacataagttaatttctaatcatttacttcaatgttatttgtttatcatttatgtttatgttcgaatttaaaatttaatatatattatgacattacatatttaatttaagtttaaccattaaaatttggtttaattgtatttttatcctcgaactttttaatttttttgcaaattttattcttaatttttgtacttattaatgaaaaaattattgggataaaattaacaagtttcttaaaagttgagggtaaaatgtgtcaaattaaaaaattagaaaaaaaatttgtaattagagaatatttagtgatttttataatttaattgattaaagccaagctacagcaattttaattatttaaattatatatactaagagtctctagatcagataaaaataaataatattaattgtaattaatcatatataatataatagataatagatattatcccacagaaattttctattatagttttatatgattaattaggataaaatattaaattatatttcatgacttgcccacaggaatcaggaaacataactaaatagttttatcatatatttttttatatgaatttaattgaattaaaattttaacccacaggcaaattttatgtgctgaattcataattttgaacatgacttacattggtaaatcatgatacatcattattttattttgtctcaattcttaatgataagcatatatgttgaataattttgcagctatacaatctactaatacatttgatgtcccggaattgaaagggggtaattactctatctagaaggaaaggattcttctaacgttagggtatatggacattgattatgctatcaggaaagatgaatcacaggctattacaaagaacagtgaaccaaaaaaggtgaatctgtatgaaaaatgggaaagatccaacctactctatgtaatgttcattaagacaagaatatcagctggtattaggggttcaattgaacagtataacaatgtcagagtgctcctgaagtctattgatgaataatttgaaacttcagggaaggcattggtcagtaccctaataatgaagttttcttctatgaagttcactactctgagaggtgtgcgtgagcacatcatgcagatgagggacactgcggctaaacttaaaactttggagtggatatgtctgatttctttctggtgcatttcattctgaatactctcccagcaccatatggtccctttaagatctcctacaacacacataaagataaatggtctatcaatgaactcatgaccatgtgtgttcaggaggaggggaggttgcagttggaacaaggagagagttctcttatgacaactgaaaggaaggatcctaagaaaggccataagaataatggaagtggtaaaataccacctcaagctggaattaagaaagaatccaagtgtttcttctgtaaaaagaaggggcacatgaagaaggattgttcaaagttcaagatatggtttgaaaagaaaggtatgtatacctctttagtttgttatgaatctaatatgattaatattaatcataacatatggtggattgattatggttctacaatccatgtttcaaagaccttgtagggtatggaaaacctgaggaagccggtgggaagtgagttatgcatctattcaggaagtaggatgagttcacctatgtaggctattgggacctgcaatttgattttaagtagtgattttgttttgaatttggaaaagactttttatgttcctagtttttctaagaacttaatttcagtttcaagagtagtacttttgattattcctttacattttatgagacatattttagtttgttttataaatctaagtatgttgggaatggtacattgtctgatggtcttttctatactaatttgcaaaataataccacttatgacgctatccatgttagtgttggagattgattgtggttcacattgatgttaattgatggcaattgatttcagtaacaacccactaattaacgtcaataatcacctttgatggaaaggtgaacttaaaagggacgtgctcatgtttctggtccctaagcttactttgataatgcacatacaccatctacgtgagaaaagagaaagcttggaagcaccaagaaatacaaaagatttgcagcagtcaaagactttgcaatggcgggaggtattcctaatccttttattccgcattgatctaattgttgttatggttttgttaagcatgattagatcgtttctattttaaaaactaacagatactaataaactgaattaggacttctttagcccaacatacatatgtcctgttagaatatccaaaatatattatagaatatttcttatgattagtttccttaatttttctagtttccatattccctgacatatcatgatttgtatcattatgtagttaggattgattacaacaaataagacttagtgctttagattttatgaacaacaccatcacattgtagcacattacaatactcaagtacatattatccaaagtctctattatcacctttgcctccctcaattcataaaacccataattccaacatatccaaatatgaaaggaaaaaaaaaagggaatgcctaccttgaacccattgatttgcctccaagtatcaagggatgaccagggtgcttagttgcagtttccttgacaaaatttgagtgaaattccatcagtttttccgccttgggaggagccttcttttttcgtagacatgtctagcgaatgacaaacccattaaattcacttccgagttaacacatcacaattatctcgaggttcaaacaacaagagatcatgcactttttaaaaaataaaatgaaaatgaaatacaagggatatagttagaaacaaactcacaaggatagtcaaaagtgacaacatcaacaacgtgcaatgcctcctttaacatgatcttccatatataaaaaaatagagacaataaagcctataacaagatttaacccattatctcgaggtttataataaaatccatgtaatacggctcgcacaaagactcctaagtccatcccaagccttttcttccattccacctctcctctccaatcctcgttagatggatgatacctttgcatccaatcagaagaggaaggagcacgggcaccatgagcgaagatcacaaccagtgacaacgttgaagcttcaatctcgccgttgttgctctcacgacgctgttttgcaagtggtaacgaatccataccttcgacatagagaaatcccccaatcgaaaccctatcccgctaaatttcactgcacacactattaaattctaattttcgagtcaaatgacagacaagagaatgcagtgttcaccttctggttttggaatttggattttttttaacattattaaatcaatttaaaattaactatattaagaatgtactttaaaataatattaaaatggccgatcaatggaaatcatattgaatgataatttattataattttttatcatattttttttataaaagtattaaaattaaaacgggagtttagggtgagaaaggcaaacatgtttctcaccatggatattgttttgaaaaatcgttagatttttttagttatcttgatgatggctcaaatgttttttttttcttttttcctttactttaagcacttttttttgaagagtttcaacattaaatgtgattggtgaatatcttttgtttatcttttcattaattagattcaaaaacacaccttcattggatttttttttctttttataaaatatcgtgctaaatgtatttgtacaaaacaacactgtaattaatttaaaattcacgaggcttaaaacaaaggccctatgacaaagttgaaaattgttattccatctattcattaatacacataataacaaattattaaatataggatattaaatatttaaattaccatacaaaataaatattgaataattttttattttttatatcaaatacttttttctgtcattattattattttatttctttacagaagcgttttgttttctttttcttttcttaatagacatataaattttttttattatgatgttttatagtaaaatgataatttaaatcttttgtcggttaatgatactattttcttaaaaaaatatataatttctttatattgttgattaatagactattttttattccgcattcaaatcgcgtttatcatttagtaacaacttctacttaattttttaagttcttatttttactttaacttataagtaacttttaagtccaaaaaaagttagaccaaacagaacttaagactatttcgatcccctaatcgaaaaatataatttaattatttttattaattttcctaacttaattataactcaattatctttattaatttttcttaaattattttataactttatcaatataatatttaataattacttttatacaagataagtaaaaaaggagcttaaaaggaaatatatgaaattgaaaaaaaaaccttaactcttttacataatcaagtgatcgtgatatctcaaaataaaagtattattttaaaaaatagttggagtatagtacacacacacatatatatatatatatatatctcagtgtatgactttttcttataatataattaatttttctgtttttaaaaaatataattaatattaaattaatttgtataaaatgaaaaataatttaaaatttatcaacgtatgcatcacacaagagcacatactaataaattttaattaattattacgctttggttagtgtatatgttacactaaagtcatattggaccttattgaatttcaatcaatcattagtgtatatgttattctaaattcatattgggccttaattggtttcaatcaatcattatatatcaaatactttttttctaatattttttacttcttgacacatgatgggaaaaaaaacttttttacctatttctggattcgtctctagtgtgaaggaattcatttaaaataattttacaaacaaaaaattggaattagtttaaaataattaatttagaaaatcattttacatacatttttaaataaattttattattttatagaaaatatagaaatatcaataaaagtgaaaagcatgctcgatcgaataaatacaatgtaaagagtttataaattcaaaataaagagtgtgatatataattcaaacatttccgacgaaatctattccatcgaaaaaatccgaatttcatcgaaaaatctattgctaactcaaccatttctgacggaatatattccatcgaaaaaaatctatcgctaagtcaaacatttccaacgaaacatttttcgtgggaaatattctgtcgaaaatatcatttttttgtagtgagacaataccaactaccaagcacttcaaaggtgtcgaagatcagtctcattgaattgttggaatcgaagttcctacttcaaaaacttctcatacacagtcacttgagtggtgacaatgtgtgaatggttgttaacattgttatttttcgtttgtcgaaaaaatggtctttgataaagtattgaagattagtcttttaatagattattttgactaagtgtcaaaatatagtattttgcctaactgtatggtgatagaagaaatgaagatttgaaaagcatcaagacaataaaagatcaacagtgaaaattgaagatataagtcatcaagggtaaatatcgaagacaaaagtcattgacagtaaagatgatgactgcaagttactggaaattatttggaaagttatgggtatgtaggaactattgcctataaatactagtttgtaccatgataatatgatatgattcagcaatgatccaatgacttcaaatatcttttgaaatggatgaaagactcaatgaccaaagtaagactgaaaagaactaagaagccttttcaaagtttagtcaagcaagtgtccaaaccaagaattgtctcatttgtataacttgaagataaattaaaagacaataatttgaagagcacaatgaacctaaaagtttatactcaagatgcaaatatgggctaaattttatttggatagattatataacttttggtctaaagaattaattaaggcccattttctaatttttctttaattttcatattttattttcatgtaataagttcagatggttgttgacatcttttaagtcagtttttatgattttaggcttcccaagttataatagtggttaacagggttttattgctagtggaaatttaattctaagtgagaatttattcctagtgggatgtttagaaggaaacctaacctataaatagtaagagctttgtagctttgagtagatttgaatctgaatgaaaatttgagttttctcccttttgtgagagcttcccttggttcttgggtaaagaactaaatctgatattatcaaggcaacttgtgacgatcaaatctatgacttatcactcatcttctgacctatttcttgagtgtggagtcaatatcattctctaaaagaaaactaagtcagtttctaagtttgaaaacttcaaggcaattcgtcccgttttcatgtttatatcataataagggttgaaacatataataccctcatatcctcttaagtccacgtgacgcttataagtccatgcaacatttacggattggcgggtgaggataatgttttcaaccaccatttcaattccaacattttacttttttcatcaactaactttatttattttcacttatatttattgcacatcttattctcattcctttctcatttttataatacttttttttttgacaacatcttctcttacttaatacgtatccatagtttgtttgattgtacttgcaatcatatattttaaatcgaactaaacataaaaatttaacacatagacccatggcaaagggcctaccaagaggataaaagacctccaaaagaagaattgtccatttcctcgaatatacctatgagattatgtttgctaatgaaaacaagcgcaattttcactgttaacaacgataagggtaaaatttggaaagaacaaaaattaaaaatgttagtttcttaccgttacctttgttatgtaaaatttgtctaagttatgaaatttatataatttcgatgaacttgtctcaaaagaaaataaagaatgcattaaagaattatcaacatttggagtaaaattcaaggaattgtattcgtcatcaaaagaattcattgataaaaattgatgtttttgataactctattaaagcatgcgtgacatttaaaagtgctaagaaacaaaatcgtttcgaaattcgaattatcaattgaagcagtcatagaagaagttacacgaagtcatcaaataaacattatatttgtgcaattagaaatagtgttgtataggtgtgtcataaaattttaagtattagaaatttataaataagatctctgactatcagtttttgacaaattgaatcattatcacttaacttcttaaacaccgacaacgctgtacatcaaagttagctactggttcaaaagatcatcgtgtatgtattcattctcacttttaatgaattcgtgtttctttattttactgcatctttctaatcctttacttttttcaatctctattttttctcaaaatcttcactatttcaatctctacttctggttactattaaaattactattgaaatctaacgattatggaaattaccttttaaatcaaaaacactattgtaaaatctatttacaatccatcttacaaaccattatatgacattaccataactatttatggatgtttttatcaaaattattatcactaaatgtattaaatattagataatcctctaataagttgaaatgaaattgtttctttgatgaaaaagaacttacaatcgagaataaattctatgtcttatatttaaatatttatttattaataaaattatttaataaaaattactcttttacaataataaactatcttcgaaaaacaaattatgaatttcatttactgacaaagttttttgaatttgatagaaggatcaaaattatgaatataaaactaaagaactaaatacttttattttaaagtagatgaattgaaattgtggaattttataaataaaaatattaaatgtctctattttaaaaaagagatactaaaattatatatttaaaaaaataagagatcaaaatttaagccaaaatttaatagacaagtgtcaaattttcaatggttagaaggattattcaggatcttccattcggaggctctagcatctctcatcgatctcgctcttaaaagttctttctgcctccttcgtggggttttgttttgtttcgattctcgttagggttttctcatcccttttcgatccccaattacccttttctttgatcattcagtgttttcttctctttcacttccaatttcgatttcctcgttaggtttttccttggaaccctcaatctcgcaaaaccagcggttcaattcatcgttccctacaatctagggtttcgtttcgaaaatgcctccgaagacggcgaagcgagggtccgcgtcgagcgcctcgaagaggggtggcagaggtggcaggggaaccccgaaggctgcacagaaccaacagcaacatgaacctgcggaggagacagtgaaggttgaagagaaacaacagcccgtcgttgttgttgatgctgaggaggaacagcagaaggtggtggtggaagaagagaatcctgctgttgaagagaaacagcttgtggttgaagagaacgaatctgctgtggttgttgaggataaggctattgacatgaatcaaatggctccggaggctgtggaagaagcgtcccatgccactaatgggttgagcgtggcgaaaagtaagtttcttttctttactcttaagtgattaagataagatttttagggtttcttttagttaggatgggggctggaggttgtgaagtttagggttttggttgtgtttccgagttgagattaaatttggttgtaatgaaggttttaaattgcaattgtggttatggtttcattgtgatccttgatattgcgggaaattggaacaaatgcggccagtgcggtcacttgcagttgcagttccgccacgatcattggtaaattgggacaaatgcagctgatgcgattgctgttttggacccgtccttgatattgggacaaatgcagccaccaaaaattgggataatgtggctgcatcgccgcttctggttgcagttttgtctcaatccttgatattggggtaaattggggcaaatgtgtggccaccctaaaaaccttgtagttgtcaccaaaatcaaccttttattaaaacctcggtcataattatttttgggttcttatcttgtaaaatttacattgttttagttcccttaggatatactaatctgattttttattttttttgaaaatgttagtgaatatatgatgtttgatagatctgttctctcctccttgtgtttgctattatgttttggtttgaaggaaatgtactagctaatagcaggaaagctattgcacgatgtatttctccatgaacgtttaaatgataatagttgttccttttcctctctgctagatgttggaattgagttggggggctattgattggcatgcaacccattcatgttctttagatgagaaaatttgcatttatttttcggttttttgtggttaaagttctatttcagttcatttgtgtgttagtgtgctgtcatgagaatagtttcaactaggaattgtgagattgattatggggtgtggactaccctaatttaatgaaagctatgatgctggaaaagtttggtctgttttgacggggatcatttggtatctttatttttgacagacgatgaagaggaggttaaggagtccatagatgaatatgagaaagatgaacgcttagatttggaggataatgatcctgagtatgaacctgaggagtatggtggagttgattatgatgagaaggaaattgaacaagaagagggtcatgaggtaggaaatgaagtcgaggaagaagaggctgaagataatgtaggtgaagaagagggtgatacaggtgaggaagaagtcgaagatgttcatgacgaacttgagggtgaagaggagcatgagcatgagcatgagcatgctggtgaggagcatgagcatccagactttgctgacgttgaggaagaggaacaccgtgaagttgtgaaggagaggcgaaagcggaaagaatttgaagtttttgttgggggcttggacaaggatgctactgagagtgatctgaggaaggcttttggtgaagttggggtggttacagagatcaggttgatgatgaaccctcagactaaaaagaacaagggatttgcattcttgcgttttgaaactgtggaacaagcaaaacgagctgtagcagagctaaaaaatccagtggtaattttttttatcttctcaatgttagaatagacttaaaactgaagccgtattaaattatgtgtttttcatcaccccaatttcagattaatggcaaacaatgtggtgtgactcctagtcaggacagtgataccctctatttgggaaacatatgcaagacatggacaaaggaagctgtaagttaatgtttctgggtctaatttttgcaccttctgacctcaaacaccctggttgtgtttgatagtttttttctttctacattcaagtctgctgagtttctgattatgaatgaaaattctggtggcagttaaaagagaagttgaagcattatggagtcaccaatgttgaggatttaactttggtagaagatactaatgatgaaggaaagaaccgtggatttgcgtttttggaatttccttctcgttctgaagctatggatgcctttaagcgactgcagaggagggatgttgtatttggagttgataagcctgcaaaagtttcttttgcagattcctttattgatccgggtgatgaaattatggcgcaggtattttctaaatccaattccttggtttaacgagggatttttaaatggaacctgcatacatggttctctggccttgctgaagcttgggttgctttaaacattgctgctgggttccaacaccaacagtggtttaatttttggttgtctatattctggatattgtatgtctttagttttaaattgtagttgcattggctgggagcattttcccaatgcgcttggtaacctcagtttaaaactaaactcatcatttatattaaagaaaccacttatggttgatcattaaattactatattctgcattttttattgaatttacttttaagggtagtcagacacttcagtagtgaccagctatccttgtagcgcggtctttggtgtttagatgctagtagaactctaatttactgataaagtgtttaagttgcaggttaaaactgtgtttattgatgcattgcctccttcatgggatgaagattatgtccgggatcttctcaagaaatatggtgagattgaaaagattgagcttgccaggaacatgcctgctgctcgtaggaaggactacgggtttgttacgtttggttcacatgatgctgccgtaaaatgtgctgatagtattacaggcacagagttgggtgagggagagaagaaggtctgtcttggatattaataaactgtatatgaccaacagttaaatggggcattttataacgcttttgcttctttcaggcaaaagttagagcaaggttgtctagaccactccagagaggccgcggaaaacacattagtcgtggggactatcgttctagtcggggatctggaatgatgatgcggccttcatggagccgacctgcacctcgttcttttccttctcgtagtgtaagaggagttggaagtcgtgctctacctgtcagaccggttagtgtgagagatagacgccctatgatgcccataccagcaagaagtaggccagtgcctcctccatctagatcttatgataggagaccagttggtatgtggtatacaattattttaccaaatagactgattggttgttactattgttcattctttttttataacattataaactattgtattatcttgttagcttctgcatatccaaaaagtagcatgaagagagattatggtcggcgtgaggatatacctcctccaagaagtagagttgctgtagattatggctcaagggttgcttctgaaagacgaacatcttacagggattatcctgcccgtggtcctggctacactgagctccctagaagcacatctcgtgctgcaccaaggagaggctatgtggatgatgggtatggccaaagatttgagagggctcctcctcttcctcctcctccccatctaagttatcgtgaaggacgtccccgagattatgatgctctgtctggctcaaaacgttcttatgctgctatagttagtattatttctttgtatttattataattgctctgttttttttaaacttgattttgttctctaattagtaaatgaaattatttgcttttcatttttaatcaggatgatgttcctcctccacgatatgctgatactggggctcgccaatcaagagctcgactagactatgactatggtggtagtgcttcacagtatggagatgcttatggtgataggttagttttgtctaatatttaaggttttatgcatttttttcttccctaagccaattattgtgatgcaaaccattccatgcttttgattggtagacttggaagatctagtatgggatatggtggtggcagcagaagttctatttccagtcaagattcacatgggttgtatagcagtcgacagggcatgagttatggaggaggtgggttttttacttttttttgctaatagtctgatttattgttgtcagcatcagaatctttgtttcttacattttgacgtgttccatgtcaggttcttttggtagtggtgatgttggtggcatgtattcatcaagttatggtggtgattacatttctcgtggaagtgatgtaatgatcctggtctttcttagtcgctataggaagtagcgttatagatacatatatttttgatttattcttatttattgtttttcctgtgctgtaggttggtggcagctcatattcatcaatgtattctggaaggggtgtgggtggtggtagcagttatatgggtggcggcggatcaggatcttattattgaggtaagtcatctgataacttcttgggattgcattttgtggagtacatcaggatgcatccaatataagtttatatttttctgagagatttctctatcctcgaaatagcatctcttatttttttcacaagtgccggcgaaggttgcactctggtcaccagtgcatttgtctgtgaacagatctgataagataaagtggctgctgtaggatgactgttgaagcatgatgcctacaatttggagacaaaggattgctatttatagctttttttttggaaattgtcacaaaatctagcttatctcaattagagatgagatgtattcatcaagttatggtggtgattacatttctggatcagatgtattatcagtacttgaatttttatgctgtacggactcaagttaattagagacggaaaaagtattgagcagtgatgtgtaattaatatcatacttggacggataatgtgaaagatttcccactgctctatcttccttttcatttggacagagatcaggctagagatgctacttgtttgattaaggcttcttggatttttacctcctgaatttatcaataagttggttctttattttgaatctctaagagatgtttagttactttggatggattacttgtttttttacagtgatatgatcagaacagaagtgaactaattagccctttgttgagatagtagtaataagagcactacttcagcaattaataaagtcaaatggttagtttcttgggatttatttgacttggtgtcttcctaagatggtaaaaagcataatgcactggtaatatttgttgctggattgatttgatgcttttaaggtttttgtgctgagggggacccgaagacaatgctaaagatgcattgatatctttccttagctagttaacttcttagatttccatattccaattcaatcatttgtacacaattggttgacctccactgacatggaccttagaagatcagttgcctttgcaatatcttgggaaaatgcaacaatcaagtgattaacagattagcagaaaagggttgagtatagtctgttactgagtttctgaattggaatttaattattaaagttggttctttatgtgcctggttttaccacccttcttgcttaatatagccaatccctaacccaaaggcaaaggttgccgaagtttatgcttgtgtggatttgatattgatttcatgtttaagtgggtgtctcctattaccatacaatgtttattgagtttcaaatacattactattttcattcggctctcaaggcactggaagctattgcctatggaatggggtatcaattatgtcttgttggtgggctcgtttaagactacaaagcttttaggattttgctaaattagatgcttttacatatctaattttcttatgcatataacacagatttcagattattgttgcattaatattctcaggttcttaggcttttcaaattgttaatcttacaagtaattaggtgccagcctgtagtgtttcgattctcatttaattatccttcactcggtgagggttatgtactaacttaagttttagtttccagtttgttctctctctcggtgcagggtctaaactctcatcaagcctttgttttgtaactccctgtatatacaatatggaagtttaccatatattttttggtatcttgttttatttattttgatgctgtcacaggtttttgtaaatcaatgttttgtggattggttcatgcatgatattgtaaatactgggcaaagtaacatgttggttcagattcctatttattcctcctatgttgtgcatgttaacgtattgtataactacagaaaacaaggtttctggaacgttaaaatattcttagcaatactagcttttagtttttgacatgggctaggtgtcaaatggtaaaatgtaggaaaattgggtgattagatttggttgacccctaccattgactttgggtgattaatctcaatattacattaatgtgcaaaacaggaactaatggtaaatattcgtgcccaacgtttttaatatcattcacctaacggagatggtcaatgcttgactacagaggtgaaacatgcaaacataaatgtgaacataccttacctgacctcgttgaactaaatcaggctacaaccgaaatgagataccggtgtttaatcgattcattatataattataatttaatttaaatttagtcacatcattagaaactccccaagaatgaaagataatatacttgcatcacttgtgtaatgcaatgcacaataatggttatgtatacaaaaggagtaccatatgtattaatctaacatcaagtagtgtcgtgtatgacaaatcttgaagattaatatatggaaagtagcaatatagcgaggtctttcacactacaaaaaggcatatcgtctcatagccaagccaatcgcgtttaagaaaataaaaggaataatttgcatttaaaggggaataagggcttttccaaagattaaggactatagtttttccttaatttcttaactttgcaagccatctctagctcttgttttccaaattcacaagcttagagtgaaagattaatgaaagaaggttacgtggtgaaggtgattagggtaaagaagagaaatagcgtaaagaaagatagctatcttagatagaataagttgggtgaacgcacttcaatgcttcaataatcaagaagagttgtttaaagtgaaacaaaaccgagaagagaaagagaggagtaacgatggtaagagaaagaaagagtaggatatagtataagcatgaaagatattaggaaaaaaagagaaaagaattaaaaggagtgagaggctcaactgcacaaagataaaaatggagaaaaaattctcttaaaagtgttgggtgtaatatgtggttaatattctgcaagtacaaaaatgaagtcaaacataataagtgatgtttcctaatgtgaaattgtcgtgtaacttctcaaatacaaaataagtaatttttttaagaatatatctttagagaaaaactagcaacacttcatgtgatatacttttttgaacacttcctttttgattggtttaaattttttaaaaatcacacaaaattgtggattccatatcttatttaatgagtctctctcataattttataatttttaataaattttaattaataacaaaatatattaaagaatgtgttgttaacaattctcatatctctatgacttggaaacaaatgtttcgtggctgttccctaaggagaaggaagtaaatcttatttagcttacaacatttacagttagtcaatgaagatccaacttggtgatatctaatcaaagagaagaaactaaaatttgatttaactttcacacattatatcaagtcaatgtagatccaagttggtgttatctaataaagaactaacacatatgtatttatgataaaaaaaagtgtgtatacatataaagctaaacatcactttaagagataaaaaaaagtacattcaaattgatactagtacctaaaaaagaacaaaaaaaaattatctcataaaatattctatttaaagtattaagtataataaaaatatacaaactaacatctattttttatattaaatattactaaggaaaaatgaggaaattacacctcgacaagttcatttcaattttcaaagatggttatttctagctaggtatgtttatgatgtgaatttgcaatctaaaagacaactagcctctatcttctagtaacttagtcattttttatccagcttaactccagagttattttctaaacaataaaattgctctatctaatggcaaccactgcacgagaccaacttcttatcaataattatcctcaagtagtttgtgtaaaatatggtgacgacctttcgattcatattaaatttactttgttttatataataataaaaggatcaaaagataaaaaaaattcgaaatgccaactcgttagtgttttattttttatttacagaaatccacacaaatattggtacaattttttcaaaaaatatttattaaaacgtcattcaatttgaattattgcttttaatatattttaatgattttacacggattgtgtcttgcaaaaagaaagggggggtggagggagacacgttttaagttttaaataaaattatgctaccacacattattttgcattaattcaaattaacatttttctttattttcgtaaacaattaaacataaattacttttaaatcgttcattacattattcttatgtatgatgcaattattttctagattttttattcgttcatgtaactcacgggtttttatctagtttgttatgaaatttgaatatgaaatgtattttttttatcctcactatacgtgttgaagaaaacagaaaaaaaaaaaaattgtcttgtaatgacttaggcaaattttgctgcaaaacttttcctactaaactaaacaagattttcttatggagaagaaatgctgccaagtattaacaatttgttatagaatttgatgaattcaaaacctacatcctaaagtgttgcattagtggtagatcttaaattgagactttagactactttttgtggatcatatagtaccacataggattaaagatctctcaaaatctctataatttttttcctttaatagtatatctcattttgagatcttagggagagagaaagagaaaataaaattattcattttttgaataatgtacatatcttgagggatctcttacaaaaactcatttttcatgttgggatctcttcacatcttttagtagaagatctagtgaaaatcatatcttgaactcaagatctaacactaaatttttaaaaaagtaattgatattgtaattgtcttccctcaaattttgtaataatttgtataacaattttcttcagagaaatgttatttagtactaatcctttgtcacgttgatcaattagaaattgacgcatgaggttctcgcattaacatatacgagagagtcgataaagaaaacattgtattgtaattgacttttgacaattttcgttaaaagaagataattctaaatatgatttccgtataagagatgagtttgtgattgtatattatattgcatcaatctaaacttagttcgtggcttatattacattagtattcatgttatacacacaatcgattatttagtgatggttggacattaatttagggaactcctaccacatgacaaattgggattgattcccaactttcttgtcaatttatgtcggtggtgttcttatgagaaatagacaaatagtcttacatgtttttttttttttttatgttaaatatattaatgtttaattacaaattatctttgtcaagggagtctagtccaggatttagcaagatgagctagttattgtaaatatgctaacattgtatttgatttctacttatattttttttttttttttacaaattaccttcttaatttaaaattatattgcaagtataatctcaaaaaattatatatatgaatattgaccttacaactttctttttaaaacatttaaaattctgaatctgtccatttacattgaggttagcacgactgttagtgctggatcagtatcatgtcatgttcttttgatttgaatgctgctcacttgtcacttaaaagtatggggtacatgaatgagacagggacgatgtctatgttgaccaaaggtggcttaattactaaccgattagaaatttgtgatccaaaattcttgtaaccctatgtcctaaggaaacaaaacttatgccaagttttttggggttggtgctattacaattgaacttctttaggacactcatacacacccacttctctctctcttgaaccaacttgttatggttgtctaattattgcacatgttccttattcacattctaagaattagcacaactgtcaagtagcacaaagtgtcgtctcttccaaatcatcaaccacataagaatagtacattttcttctcctatataccccaatgccaaactggctctatggtcacaattcattatggatcaagaattcaaggtcctccagtgttctacaataactgcagtgggtgcagttcataatctcatgcacctttcattttcatttgtaatatttttttcgattaaataacctcaagtacttttttacaatagagattgagtatagttttggtgaaattgtagatgatctcaatattctgctacaaattttgtctaaaaggaagtgcattggtatctttccttgctctcaaatgacaatagaatatgttgctagaatctaaaggtggataagaatgagaatgtcaatttatatataaaaaaaaacaagaaattaaataactagtattttatagtcgcaactctgaaaaagattttacttaaccaccattccaacttgagggttatgcctagtgatagtgacaaaattagaaattttaagttgtgaaaacaatacttgtatatataaatttgtggacacaatacttacattgtaaattgactttttttttttttccttctcttgtaatttaaataattaaattacagggacagtttgtaattacgtgtatataacttaataaaaaaagttcgttagagcaactataccctcgaatgtgacaacgtagatccgtcccaatttggtgatatttggttaaagacaaaataaataaataaactaagaaccttagttcaaatggaaacaagttgtttctatgattgcttgatccaataccaaggaggatggttttctttcaatttagcctatcttatccttcttaacaactagtacttagggattctttataacaaaaattaaaataaaaaaataccagacttcacttgtgagactgtattgagacaagtatgtctaaactaccaaatactataagcaaacttaagaaactaaagaaaaaccaaaataattttttataaaaaaaatagcaaaagaaaaagtagaaagaattagaataagaaaggagcaagcggattgcacaaggaaaagtagtttacttgccagtctgtaatagaatcactacatttacaactagtcaaccatactacacatgcactgagaaaatgcaaggaatcaaacagctagctgttgttgttgttgctgcttttgatgagaagattcatcctcattgaagcacaagtgggcctttagtgattgtcctaaatttagggtggaatctgaaaaatttagaggttggatcaacaacatttctctttggagatggacacaataggcttggaaggtgcctggggtcacatttaaatggaaacccaaaccaaagaggaaatccaactcaagaaaattcatctctattttggtgattcctccaactttggcatagtgagcattgttgtagaacctgaaaaatatcagaccacatgcacaaaaagagaacattaggtgaatatcatgtaaagtgtttttcttatagaaaattagtaagtcaaacatcaacaatatttggcatttgtttttctttaccattcaatgttccacaattgtagatatacggagtaaatgtactagtgagtgtataatatcttgagagggtttaatcttaaccacataattaaaaaatctaaatgaatgatgaagattaggtttaaataaaactaatgtcaactatttatacacatttttggtaaaaattggacttttatttttttgttacagtcaactatttatatatagtcatactatcaagttgattcttctcttttgttacatttccattaactagctcgctatttttttatgtatataatatattaatatattaattagaagatacttgctggatatgtgcagtaaactcatgggatcacatggtagattgtcaattctcaatggaaactggaaagccagcctggccatagtatttttcacaagcaagattatattttttaaagaaatattgttgtcataaacacagtttattacgtcagagagaattatagaagattaaaaaaaaaaaaatcccaaaatgagggaaaaaaaatcgggtaagctacaattcataatttggggttttaatacattaaaattttctactggtactagaattcttcaaaattcagaactggaaaagttcacgggttctccaaacagaggaaatgcagagcaactgaaccatcatcatttgacttttgtcaaactaactgcaccatactacacagaattcataagaaaaagagaagagttcaaagaaaaagaataaaacacataattcataattgtttaacttaattattatatatcaaagtttcagaacccagaaaacatgaatttgaaaatttgttaagaacaaggtgtatttgatttctattttcgaaaactatttttagttttttaaaaaattagacatctatgccatattgccatgctcataccttactacatgaaatacctatccagatgatccacactcaagttaggaatgcaaaacagagaaagaagatggaaaaacctaccaattgtttttttttttttttgggaacagttttcgaaacttaataaattttggataataatattattactaagcagcatgaaattaattttttttaaaaaagttagaatgaaatcaaacaatctctttgtattttcagcttacttagaagttagaacaacaaaaacatgatattctaactttgcaagcctttaaaacacccacgattcataactagttaactcaattattgttacatacttacatatacatcaaagtttaacaatcaagaaaagttagaatttgaaaatattctcaagggtactaactaatttattaagccacttacatgtcctccatgaacttggcagctatcatgacactagtgatgagcaaacggtgcacgttgaaggagttgatgggcaaagagggttgtctctgagtgaatcggtcgaggtagacgtaggcgacgacgaagcacgaggggctgcaatttgcatacttgaagattctctcaaggtagcactgaattgagatgtttggccttgtcaggccatggaacactgagatcttctggtgctgttggaggtgttggttgtgatcatttgactcagccaccctctcaagaagagaggagaggaaagttatcacttttggcatcacacttggactctcctcctctgctatggacattttgcaaaaggtttgatgcaacaacaacaacaacaacaacaatgtttgaaattatcatggtgtgggatatttatatgccacttttttatcctatgctccaagaccataggttaaaggaattatcaaatgatttctttttatgctttttaatgtaatagatgagttgtttttaagaaatatttttcatttttgtcctcttaacctaaggcatttggtgcatatgtgatagaaaaatctactcgcacattatagaaaaaagatcaattgacctgagttgtcaaattcatcaataaaatgacacttttagtaactttgttatatttattgaatttgaacagaaatatcttacaagttgaaatgtaaatgttagacttaattacatatttggtttctcctactttctcaattttgcaaatttcgttcttatattatttttacaaaattgatctcttattattttaattgtatgctaacctaacatgtaatagagtgtcacattaacatttcattatatatcttatataaatgaataaaaaaataggagacaaaatttgtaaaattaaaaaaatataattaagctaaaatatcatatatagagaaaaagagggtgggggatagagagatcggtaacagtaggtgcttttcttgatgcaaaaatggccctagtaatttaaataatgaattgcaagttggcacatcagtggtggtatgtgtcctttttcggctataaaagttttggggtttgagttgggtaatgattttgatttcctctttaatttcaaaacttgacttgtaaacgagggaaggctggtgcgtttattgtggattaatgtcactttctcgaaattaagtagtggttttgtagttgtgatttatttgtgaccatggagatggcattccatacccttcatgtgattacatgtggggaatttgagactctagtgtaatggtcccactgtttggagaccctagcatgtgttttgattctggtacaagtgggtgacataacatggatttgctatgttggtccacaccattgccatattttgccttttgttcatatatacttccttgaacaaaaaaaaaaaaaaaaaaacagcatagagctggtgttttttgttcaagattggttcatgtgacccatagaaatccaaagtttgaataatagtgttctttttgtgataatattaaatgttttttaaggcatccaactttgattagattttaatagatttcgtttctaaaaggtgaagattaatgtgtttaaaaatcaaggaacctacttttttagaaataaataaataaattaaaagaatacatgctacacagtattagtacatacttttcttagttcaatttaaatctcaatatcttcgagagacagcatacatcaaacatgaacatatcttgagggacggattcaagagtgtaagtattaaagcggggggaatttttttacacaatttttgaaatatttaacttcaaatagataattatttaatagctattttaaaaaataatttattattaattttatgtgtaaaactagagatatgatttcctactagaataaagttaaacaaattttaactcatcaaagacttatttttctggtacattttcctttactagtattttttctctcatatattcataatggatcataagagagaggaggatcaaggccaatgcctcccattggatccgtctctacatatctttaatggtttgtcacatcatgagattagtttcttctattaaattttacttttgattgcattcttgtcatgtttttattttatcgacaaaaattaattattaatttgttattttttgttagcgagaagatttgaacccagtacttttttctcctttgcccattagaccaacattatgtttactttgtattcttgttatgttgattgttacatagcatccatcttgattttgagataacatgcggaagaaggagcaccaatgattttgtcttaaatccaatataaattgagactttaaatgaaattttgatactttgaagaccgactgtgctgcaatcccttccgtcaatgtgccattaatgggaagcaatttttcacaaagaaacaacagctatagaatgagatgtatttttgccataagcatcaagaaacaaaacacagttggaactatcggctgtaattgcaaatttgcaaatagaaaatagagacacgaaccttttgcaacgtgacacctttatatgtggatccaatctaacgtgccatgaaagcacaattgtaagatttctgatccacaatgtcatgaacattatctaatttggtttaactatctaagcattgatacttagttaacccccggaggaaactattgtttggagacggatgcttgttagtgaagaaagtaaaaatagtacagttcaaacttgggaaaaagcatgtcttcgggtaaaaactattcaaacctaatgttttgtaaaattataattatgagaccttatgctactttgcatcgttaagctagtaagtagctgtttagtttagtacatgattaatttcaacagcaggtgaatcatggttatcttggtaatagtgtgtacggaaccaacatttttccctcatagaaccaataatgcacccccgggtctgtgagggagaacatgattctacagccactagcaaagttatatgatataataatggagacaaagcaagcataacatttaatttataattcgtgctacatattaattagtttaaatggaacaacatctatatcgggttaattggagtttattgagtatgttagcttatacaatgtcataacgtgatacacaacagagacatttgcaactcgatcttgagcagcttcctattagaagattcgacttgaacttttgtttctcaacagttacaaattgagtgtcattctattgttaaatggcttatttttgttcggttattattaaatggcaacaacgacctctatatgtctcatagtaaacttaggcaatcgctctcaaaaaaaaaaaaaaaaaacttaggcaattgttaaacatacctcccttaactattagatgtacctacctctcaatttgaagtatgctccaaacaaattatattgcctaaacttacctatgatgcactactaaagatcctatacgttggatattcacaaagcccatactataatttctaatcaaggtctatccaaagggaaatttatatccttcacctcccattttgcatcctacacctctcaaaagatttcagtggacacaacagtcctttactaggtacctcgattccaaaacgactatattgaaatataattttttgtattctagagtaggttctgaagtgcttattctattatggaatagttgttctgaaaatgtatcatattctagaataattgttctggaataggcgacgtaacccttcttccctttttcaaactcaaaccctacaggacccgcataaggacaatggtgccgcgttcaatgccgacgatccaagaagagcccctcatagctccaaatcgagatcatccatctccgtgcaggtcttgttcctcatcttaactttgtagaaatcaatgtttttggctgttgttgtttgaggattcacattattaattggatctggttttcttgttcaaggaggtggacctcttgtaggacctccgccacccaccctcatctacatctacgatgagcgtgacttcatcacccacccccttgccttctttgtcgcctccaatgacatcgtcctggaaaactctgttgccttcgatggcatcgtacttgggaggcgaatggaagagggagaggaggtgttaggagtaaggatatttttgaccattgagactttttgggaggtgtaggattcatattgggaggtgcaagatacaaatgcatccaaagggggttgggagttatcaatttaggcctaatgttaaatgtatgggctttgctatccacatttactctctttcaacccgaaactttatatgttttgtacaatttccaaaaatactcatggcaaaaacatgatttcattgaccaaaatatacaatggaaatatatttcagttgtataagatgccaacaaaatacataacaaaaatttgtttttgttgtatattttaataaatgaaattgtgtttttcttgtgtattgaatctgtgtttctcttgtatattgaattatattaaatttgcacctcctaatccaacgaaaatacgctttagctgattaaaatacacaactgaaatttttggttgtgcatgtttaaaaaatacaaaacctgtgattgggtcacaaataattcttgccaccaaattttttttcaaccaatcttaatcttagtgtttgggtcatgaatattgtagcatcgatgattattgataagtgccaattatacttatacgttgatcctttaacttgacacttatctcacttttctctaacttttaacagttatatatttaacttataaataatttttcattaggttttggtctttgtttgtaggaaaatttgacgaaaagaagtcaagttttgaagaattgaagtagagaagttgagtgaattcaatccgtgtcctccatgttttgaagctttcattaggttagaattgaagtttacacatagattagtagtttatctcaaacacgttagcattgtccatctcgtacatatcaacagttttgaaaaagtagacaagttgagtgaattcaatccgtgccctccatgttttgaagttttcattaggttagaattgaagttttcacatagattagtagttgctttgttgggtgatttccttttatcccgtttaattaccaatatgatattatctagcttaatttctctttatacaatccttatgctttttaagattctaattgaatttagaagagagagaaaaaaaaaaaagttcatatggcgggtgtttgtcattattccatgttcttccatccatatgttcagtaataatcttacttaacatctgattaatcgttaatatcgatatatcacatacataaaagtgtaaaacattggtatgctaatgaaattctgtgaataacataatacaagaaacatatatctcatgtgtccacgcagcctatagaattgaaagcaatcccatgcaaattatacaattccctatcctatccatcactatattctagtgggttaaggaagggatatatgaaaacatgtgattaagctaacagtagagcgaagaaggcaacaatcataacagttatttgcatcagagtgaagcgtgctccaacaacaagcataacagaaaccgcagacacaaacaaaggaaaactgaacattcctaggatggcatgccaaagtgaatgaggtccttgtggttggagaagtggtttgctcaattttaatgacaacaagcaccaaaaaagtccggggttgccaaccacgatgcttatcttcctgtgatttctggtgttattctttcaatatcttattgtattatgcttatgcttcataagattctatatgaatttaaaagaaaaagaaagaaaagttcatacgaagggatgttcctgtcattcaatgttcatccgtgaatatgttctgtctggttaatcgttgatattgatatatcacatacccaaactttgttttattgttatgcgaatgaaattatgtaaataacaagattaaaacaacttgtcaaccctgcctgaagaaaacataagtacatatatgaaaactatctaattaagctaacagcatagccaagaaagcactgagcataacagttatctgcatacgagtgaactgtgctccaacaactagcataacagaagaagcagatacaaacacagtaaaactgaacattcctactatggcaagccatagtgatttgggtccttgtggttggagaagtgacttgctgaattttaatgaacacaaacacaaaaaaaatgtggaggtggcccaccacgatgcacatcttcccatgatttctggtgttcttctttcaacttcagaactaatgttcattgatgttctactatcctctttcccctggaatacacataatatacatcacaccatatattagcttagttaaataactcaccacacacaaccagaacaaaatgcataattgtgttcaatgtgtactcaaaagctaaaggttgtcctgatttctcatcatggacagtgcacatggctctaactaagtctaacattggaacatcttgcttgctctgcagtttaattagtattagcataatataatggcattacatttctgcaataattacaacttatatagtttagaggggaaaagaaggaaacttacacttaaactattcatttgtcctaatgatacaagcttgcccttctcatcatctccatgctcctccttttcatggatattctgcctttgggtcaagattttcgcaacaagatttgtcaatggaaactgcaaaatataattaatatagctatacatgtgtcaactgctgactttggcatattcagattcctcaaaatcgatgtgaaaaacgataataaataagaatgattaagaacaaattagctcggtttgtttgagttgaatggagtttgatcatgatgcagttcagcatagaagtaagcatatacaacttaccgaggagaaattaggcatatacatgatttggtagtagttcccagcccaagaatccaactctctcgtactgcaaattttgctccacctggatgatatgtgaaagtctgaaaccaaacacaccttctcaagacatttttttccaatgctatcgtggcgttgatggcgaaattcaatatgaaaccgcgttttgctgcaccgaaaattcaaagtcaaaccggcttttctagaatgataatgtattttattacacgtggtactagaaaaatgcatatgcattgctgtcaaccacaccaactttcaactttaaaaggcacttaccgtggaaaacgattctactttctagaactgtgacgtaatgctgattattttaagaattgcgtggaaggtgtgttattgaaacgttgaattcaacgcgtatgataattgtatggtattaggtagaagcaagttatgtgtctcttgagcaaaaaagaaagtgattagtttgtaaacttgctgagactgagaggaacagaagaaatggacgagatcaatgagcctgcaccaccatcggatcgtggagaagccatgatagatcggatgaaaactcatttgaaaaatctaccatgttattcagttacggaagccgagaatattgcgcatttgatagaagaaataaacgtgatcagtggcgacgactctgtggtagagctgacaaacaaaattttgcaatgcatagcagaactggacacacagatttggtttaagaatatgctttcatggatactcgaggaaactatagaggaactatatccagaactatgggttatacaaggtaaattaatatccagatattaggattgaagtggatgtagtagataatgatataactcagcagcagtttctgtttataccgccatcataatttctaacatgtatgcatattctttctttgatttgtgtgcagtgcctaacatggggattgtgattgctgattcagtttgggaatccaagtttgcgcctaaagtggattcgcctttccggaaatttgacactgtaagttataactctcatcaactcttaattgccatcacgatcctgattaagtagtttagtgcatatttagatttcagttggaagaactcaaaagtaattttacttctaaagcaataattttttccttcttgcattcaaatttgcaattatgctatgtaaattactttgaactggaaaatcatttcaatagctgtaacctttaatttgtgaaatattttgagatgtgaagggagatcttaaaatgacaagtaaatgtcacacttttgagaattattattggctccattcaaatttttcttggcccttatcagggattcaattttttttttatttcagaattatttgtaataaatattaatctaaagggttaattaagtttttataccctcaatttttttgataacttttaattcatcgttagttttctgtcaagatttttagtccttcaaacaaattttgtttatttttagtcctcatttatttttattgtttaaaattagtcattattttaccagtttatgtcccttgtttattttatgagactaattttgtaaacaaaaataaatgagggatttaaaataggaaaaacttttagaacaacagaaaattaatggatgacttaaaattataaaaaaaaattgagggactaaaatttgtcaaaaaaatttgagggactaaaaattctaatataaaaaaattgaagcactaaaaacttaattaatccttatctaaacaaggtaaaaaaaaattattagttactcttattgtgtgcaatgtttcgcacattagaaaagccatttcttttaagtaaaaaataaaagaaaaaattttaattgtaacatctcgtatgcatccgatgtattattagtttatttaatcagattaacacagttataatttaaaccaattaaataaaaacaacggaagcgttttcaataaaaacatgacgttatcgtcatttcctttcaaaaccatacttcctgattcattatgtatggaaagtatccaactacctgttacgaatgccaagacaccacaatgagccttttcgatccagataacataaagaaagacagatcaacaataatatccagcagatatataaggagaaacataaaccacatatattaatatgggtataaatatatatacatcatctcaaccaccactgtggtgatacaaaacaataggcacccattgtcatgatctcacatatcacatccttacaagagggtacaaaatataccgtacatcataaacataaacagaatccaaaatatatgtacacgcacatcttccctcgcaggagtacaaaatataatcaaatacaagatgtagtgagccacagtgctctcaaaacactgccaagcagctacacagagtttgtccctactggggccttccgctctgggacccatcacctctgccagatgcatcacctgcaaaataagatccccacacacggggtgagatacaatctcagtaagctcagggttcttagaggcttctcctcctccttggctcacttccatgataacatatcatcaaaggcattacacaccaggcctcctggccctcacaacaacacataacattctctagctctaatgtgtatctgcggaattacaccgccaaagatgcatcatcatcagcatcaggactctcagtcctcagtgtaaggccggaactcacacttgtgtcatcccatcaggagctacccctttacgcatggatgcacgtatatggcacctccgagaataagcttcaaccgcgacgggaccacctatctctggtgttaagggatcatataccctttacgtgagcaaaccaactaggagttgtgctctgctcctagggaggtccatatctatctaactggccagaagatctatctgaaaggcaaccaaacacaaagcatagaatatgcatacatattatcatgaggaaaactgtaacatccaatttaatgcatatgaataatgtatgcaaccatcactccctcggagtgtggtgaaactcaagcagtgtgaaacactctcaagaaccatgaacttaccaggcaaggccgtgctctgctgttcaatccctgaacggtggtctccaccactgacaccctcggtgtcacgcccttgcacacaagcatgaatcaacaatcatcctatccgtacaatgcatttaattatactaaaacacacggaaaaacaaaattttctgcataaaattatgcagattttgtacccacttataaaaatcataaatccctgtaggaagctcctaaaatcaagggaatttagaggcatctagatttatctcctatctttcaaacaaaattggtttcatccaatttcataaaccacagcctttgtaacacttaaaatatcagaattgtcacgcactataacagtgctgacagtaacatatcagttcaaccagccattttcaaacgcccgccaacacaaggatactcatccaaatgacctgagcttttacaggtataaagtacacatacacatctttctatttccactgaaagcactcaatttggatcatcctagactgagataaaatttctgcaagattgctctctgcacagtaaaatctgctaaaaacagagtataatagcctgttataactctgcacaataaattctaggaacctccaaaaatagcacgaaaattccagaacctacttgaatctcttagctttcaaatggcactgtttttagaccatttggtttccgatagctcctgttatgcacaaaacatcagggctgaccagattggtgttcctcgctgtcatgaacatgcatgtttcatgcttggaacaccatttcaaccttgaaccaacttctacacactccaaattaaaccttaaatctgtctcaccctcccaatactcaacatttatcaatttcactccaaacactcatcaaacctaaccctaaccttatgatttctaagaatcaaggagaaataggaggagagtatcatttttagagttcaattgatcaacttggagagtggaccagctctctatagcttccaattctgcccagctactccgaatgaagtgggaagctcctagatctactcttttcctcaaattgctcacaaccaaaactcaacaacaataaaggacaagaagagcttcctttcttgcttaatttatgtttccagtcactaatcaaggagtgaagagaaatggtgtttgggtgtgaaagagagacatggacatgaaggaagaagtaggagaaagtgagagaaccatggtcagccacagtttttaacatgaggagggggatgcattcagcaatctcttattcacatcctaacctctaaacaaagaccaaaatgtccctcctttcattaatcctcttttattaatactaaatctcttaattatgcaaatatcatccaaattacattgattataattagtgacattacattaatgtatagtatcttaaagaaataatttagctttttaagtttccaactttgtgaaacttgtaccaagctacgaaaaacaacaatttttctaccaagggcaagtccttgtctttgtctgccttttgtccaaacatggcaacgaaataaaccagggcaagtaattgtgattctcttccttttgtccatttttatgatcaatactaattggcatagatgtttactaaaaatatgcatgtttttccttacagtaattgaattgcaccttcacttgttaggtacctaacttttattgcttttatgtacagagagtcaaactacaacgttaccttaacatatatcttgatccgatgcaaatggtgaaaaatcttgtaagtatagaactaattgatacaacaagttatgatctcttcgttcaaaacataattttctatagtgctattcattgctattaatattttactgtcaattggatcattataataacaaatttgatgtagagaagataatgcaaccactttgtgaacaagaaaaacacaaccttagtcttgttacttgtatagatgattggaaaatttgtctcacattaaggcaaatagacataattatgttttcaacaaaatgtagtgtcatcataactaaacatgtgttgcctaactctacattgtcaaacacactctttacccatacataaaggcgtgtgcctgttagaaatactagctatgccttattataacttggttgacaagtaattattttttaacaagtttcctagctagtttcttgtaataaaagttaatttcttgtgtgtctttcaaaatctcactttttcttttaaatatctcacatctttcaaatatctataacatatctaccaatattgaaaaagaaactatcgataaaatgtcatattttcgttttctcttgtaaaagtagtaaaataaagttaaatcaattaactagattactttgagttgcaaaatgatttcaatatttataatcattaattcctgaaatattcggagttgtgttcccaattgacacctagaaatacaataaaatggaaggtgctatttttttttcttttgagtcatgattggttttaaatatgttggaatagaactaaacatgattttattatacgtattttatttcatatcatccaatactattattttttcttcttttctaatttagctactatgagatggaatcaatctctttgataattttatcattaaaatattgacacaataaatattaatttattttatttcattggatccgttcaatttttttctattaatttctttctatccacttttaaagtgcaaccatggtttattattgttaattctatccactatctaagtacaaccatggttgatattatttttactagtcttgaaaactgagggactaaaatcacaaaatttttaaaaatgaaaagtgaaatgtctcaattaaaaataagaagactaaaattataataatttaaaaataaaaaataaaatatctcaattaaaaattatgagaaaaaaataatggatttaaaaaaataagaagacgaaagttacattttaggtaaaataaataaaagtgtagtatcttaaagaagtaattgagcatttaagtatccaaatttatgaaaacaggaccaaactacataaaacatcaatttctaccgagggtaaggcattgggtgtgtttgtttttaaagttagaaaatcaattttaaaataagcattttttatcagcatttttttaagtagatataattagtttcttaaaataagaggaaagttattttttaagcataagcaatttagacaaacacactaaaaataaaaagttgtttattttaagtttttttttaacaaataaatttaaacatttactttgcctttcttccgtttgtccaaaagcgggagctaaatgaatcatataattttctttctcttagttttgcccatttttaatgctcgatactaattgacatgagattaaatataataaaggcatgcttatttttccttaatgtatttgaatttcacctctactaagtgcctaattaacctctatttcttttatgtacaggagaagcggctgcaagtatatactgacattgacctagaacgctgttttgtgaaaaggccagagaatgaaatgatatcaaaggtacataatttttcccaagtcttatcaataccattattattttaatgacaaatggaacattgtaataacaaatttgatatagagatgtgatcaagaaaaacacaaaactttgtctagtgcagaaatcaaatcatcttacatttttagacagaattactactcacaatacaaagtatatccttcaaatatctctcatttttgtttttgatgtatctcaacataatatctaatgatatgatccataagctagggaaaatcattgtatttattttaacaaataagttgaattgcaccttaatttaacataatatctaatgatacgatcaagtacctaaccttctttgcttttatgcacaaaaacaagcatgagagagtcaagaggagaacaaggtacatatagaactaattaattacaggttattgtgttttcttcatccaaaacataatttttttgggacttatcattaacattattattttattgtcaaatggaacattataataacaattttgatgtaaaaaggctatttcaatgaccttgtctcgtgacaaaaaaagtacaatttatgtcttatgtaattatttgcaaaatcgtcttatgcactgggagaaaagacacattatattttcaatggcgcaaagtgtagtgtcatctcgtaaggaaacatttggtgtctaactccatattgttagactaactttctaccacataaaaaagatgtgtctttcaaatatatttttgttttttctcggcttgaaatatctcacataactcaacataggagcaaaatgagccatgtagggaaaatcattgtcttttccttttgtcgattttgatgatcaatactaattggcttgaaaatttaataaagagatgcatatgcatatttttccttaatgtaacttgattggatctttacttctcaagtacctaacatttgttgcttttttgtacagccagagaaagaactacatcagaaactgaaaaaatgcaaggtaacatatagaattaggtaataataacaagtcattaagtttaagacacactttttgctcacatagagaggatatgtctttcaaatatctcacaattttatttttgaaatatctcacatctttcacatacatcaacatatctaaaattatatacatggtgtgcaagtgtgtcacatatctcaacatgggtgcaaaatgagccatatatcattttgttcttttgtcccctacaatgacatttccattgcatgagttctttacatttacaagaaaataccaaaaataaagttccatagaaagaccatatattatttcatcaaaattctcactcaccaaccatatcaacaggaagaaaaggaaaattgccgttctcatcccccaaaccatgttgtaaagattgacgataatggggtgttaaaagtagataaaggaaagacgaagagatggaacacatttttgaacttttatggaaacaggctattccaatcacattctactgatgcaaatcgtcttactacatgggctgccttatatggaatgcaatgggcccaactatctgttttgggcaatcctcttgacaagttatcccaatccagaggcattgacccaatggaattaagtatggggaaagcatgttccatcacagtatgggcatcaatatttttcctgaactttatttttgcaggcatgcttaccttgtcattgcctcatcgtatacccgcatactcaatgctgggatttaatttactctattacatcttagcgataatagttgcagtgtctgggtatagtgtttcatggggtggttcagctaaaatgtcaggcctattgtttgtgtttggaggggccacatccttaatgctacttcttagcataataatcatcggggtgctatatgctagctgcatatggtgctcctatccaaaagatgttggaggagaagtaaatgagaaacactcgcctgagtgtatgatcaacatccaggatacctgaaatcatagacttgaatgtaagtttggaatatggtattttggatctgtttgtttcttgttaggtggtggttgcctttgaaataaaaaagtttgagtatttgatagtaattggtctttgaaatgaaatttctgaaaagcagtttctttgcaacttttttagaagtggctcacattaatacttcttattttttctattaatcttcctttcatagcattaactctatattactccaacttaattgcatttttttatccaaactttttaattttcggtgaatctttccctttttaatttgacataataaacttgtaaattttatcccaaccaagcaaaaaaattaggggtaaagtttaccaaaaattaggataaaatttttcaaaaaataaaaagttgagtaaaaggtgtaattatattaggagtcaaatgacagaagataaaattcataattttttaaaaagttaaaagttaaatgcaccaaattaatttattgaaataaaattcatcaaaaattaaaagttaaaaaatgtttttaattaaaattatgtagttaaatataattaactaattattttagttactatcttatttttttttccttataattgaattgccagggaccaccagtgttagcatgtatagacaaaaacttattgcccgtttcaacttagaagaccatcaatccatgttttgttgtaccacaaaaaatataaaataaaatagtcacaagcactcacattaattatttattctatatataaaagaatgcatgccattattttttttatcattatgcatgcattaattacaattattgtaaaaatcatgcatatattatttattgcaaactaagcgataatgtattgggtgatttcctctccatatgaacataaaaatgtgtaaaacatcatcctactgcttaaaattgtaagcatcgatcactttattccttaactttataaaaaaaattattttagttcctatctataaatggcatttacatttatcatttttggtacaaaaatagtagaagagaattaagtgaaaaatgactaaaataaaatactttaagcaacgttaggggctaaagcaaatagagttaatgctccaaaagctcaatccatcattcctctcattatattgaacctaaactactatagttcaaatgacgcaggctagcgtgggagaccataatagcgtggaaaagtaatatagttcattagatttattagttttataaattgatggctatgatttttttcttttgtttttccccctaaatttccgaatgtatccctgcatcttcccctctgtctccgtcttccttcacctctatcctccccgtacaggtacagggacacttgcatttgcggtgcagcggcaaggattttgcaaataaaaagaaactccactctaatttgcatctcatcgtacacacacaaaaacaaaaaactctagttcgttcacacttcaatacacataatcaaatcaccaatcgttaaagaaaaaaccaccaatgacatagcagcagctgccactttctaactgttatgaagagaagaagacatagaagccatgaaactctaatgagatcatatttgacaaaaaatcccctgtatgttctagcaaatcattttccactagtcaaaagaaaaagaaataaagtatcaaaagctactatctagttggttcaacaacatttgagagtcatcatccatgttttcactgtcaacagcatcatcagttctatcagttatattaatcttgcttggcaattcaccattgtcaatggtaccatcaggtgagccaatgagagatgcataaactttacttctactaaattttgactgcctcagcagtccaattaaaacctcagcactttccatgtcatcttgctcttgacaaagctcaaggaaaatggcttcgctatccacatttactctctttcaaccccaaactttatatgttttgtacaatttccaaaaatactcatggcaaaaacatgatttcattgaccaaaatatacaatggaaatatatttaagttgtataagatgtcaacaaaatacacaacaaaaatttgtttttgttgtatattttaataaatgaaattgtgtttttcttgtgtattgagtttgtgtttctcttgtatattgaatttgcacctcctaatccaaatacgctttcgctgattaaaatacacaactgaaatttttggttgtgcatgtttaaaaaatacaaaacctgtgattgggtcacaaattattcttgccaccaatttttatccaaccaatcttaatcttaatgtttgggtcatgaatattgtagcatccatgattattgataagtgccaattatacttatacttttatcctttaacttgacacttatctcacttttctctaacttttaacccttatttgactttaattttattaataatagaaacttcaagttagaatgtggactttaactgataaataaattttcattaggtttttggtctttgtttgtaggaaaatttgacgaaaagaagtgaagttttgaagaattgaagtagagaagttgagtgaattcaatccgtgccctccatgttttgaagttttcattagcttagaattgaagttttcacataggttagtagtttatgttaaacacgttagtattgtccatctcgtacatatcaacagttttgaaaaagtagacaaattgagtgaattcaatccgtgccctccatgttttgaagttttcacatagattagtagttgctttgttgggtgatttccttttatcccgtttaattaccaatatgatattatctagcttaatttcttattatacaatccttatgctttttaagattcgaattgaattcagaagagagaaaaaaaaataaaagttcatatgacgggtgtttgtcattattccatgttcttccatccatatgttcagtaataatctttcttaacatctgattaatcgttaatattgatatatcacatacataaaacattggtacgctaatgaaattctgtaaataacaaaatacaagaaacatatatctcgtgtgtccacgcagcctatagaattgaaagcaatcccatgaaaattatacaattcccatccatcactatattctagtgggttaaggaagggatatatgaaaacatgtgattaagcaaacagcagaacgaagaaggcaacgacaataacagttatttgcatcatagtgaagcatgctccaacaacaagcataacagaaaccgcagacacaaacaaaggaaaactgaacgtactaggatggcaagccaaagtgaatgaggtccttgtggttggagaagtggtttgcttaattttaatgacaacaagcaccaaaaaaatccggggttaccaaccacgatgcatatcttcctgtgatgtctggtgttattcttttaatatcttattattgtattatgcttatgcttcataagattctaaatgaatttaaaagaaaaagaaagaaaagttcatacgaagggatgttcctgtcattcaatgttcatccgtgaatatgttctgtccggttaattgttgatattgatatatcacatacccaaactttgttttattgttatgcgaatgaaattatgtaaataacaagattacaacaacttgtgttcaaccctgcctgaaggaaacataactacatatatgaaaactgtctaattaaactaacagcatagccaagaaagcactgagcataacagttatctgcatacgagtgaactgtgctccaacaacaagcataacagaagaagcagatacaaacacggtaaaactgaacattcctactatcacaagccatagtgaattgggtccttgtggttggagaagtggcttgctgaattttaatgaacacaaacacacacaaaatgtgaaggtggcccaccacgatgcacatcttcccatgatttctggtgttctttcaacttcagaactagtgttcattgatgttctactatcctctttcccctggaatacacataatatacatcacaccatatatcattgcataagttaaataactcactacacacgcaaccagaacaaaatgcataattgtgttcaatgtgtactcaaaagctaaaaggttgtcctgatttctcatcaccttctcaaacttgtatggtgttaggcaggggcagatccataaaataaatcaagggggacactcaaaagttcaaatacatatccagaaaaataattacaatatcattattctaggccttattttttggaattccttcataattaccttattatcaatgctttcaaatacatctttttcaatacaaggcactaaacaatcattcaatataggattgtcttcaaaggatgatacctgtgggaaaccaaaaaaaaaaactactgcattctattcatagttttgtcacactttagtttgtgccatttgtttaattttaaggtatccatctttcattgctaagtttataacaagcagaaatggtcccctggcagatatccatttttctagtgaagtatcattttataaaaaactgaaattgtttgtttttgtaattctcttgtatgaaacttggatatgggtcaatttggtatgtctgactcaactgtcaacttgtcttgtatgatcagtttgtctatgttggaagaactgcttgtcaagaagtttcactagccatatggtgtgtgtatttcaattaatctgttcagtttacaatttgagagacattgttagtgaatatgggttttgagaaagttttgcttgtcattctttgatatgaagtggcttactaacaaatcgaaacaggagtaacatgaaattgtttcctacttttgtgcagaagcacaagaagaatttgatggggattgctcagttcagatatatagtgtgcaagctagcattccaaaggatccagctgtgctgctgggttcattcaagcagaggagctcttcaagcaaccttcctcagttgacaattgtttgagggataataggtaggttccataacttcagaatatctatatagaaatatttttgataattctattgtgcttcattcatactaattttacatgggaatagcctcataggctctctctgcactttgatcactaccaatcatacaggacattaaaatgactacttattttcctacatgtagcctttcaaagcaatcttattcaaagtatgttgaacattaaatatgaaccagttttcagacaaaaaactcaaactttgattcatattattggagacctaatccatttgctagactcaatttccattgataaaataaatacgtcgtgaagcattgaatattaattcataactcataatatgtttataaagaaatgagatttcatgtgtatcactgtatcagtgtatgtgtcagtttttaatgagaaaaatagaaactaaaatgtgatatactagttattaccaagtaccaactaaactactaattaaaagctttaaaaatgtataaagcaatgaaaatttattcacatgttctatagcttcaaacaaagcactttgcagttcctttttatctctacttttttatttttgttatcgttgagtgattctaaattggattgaggaaaattgaaaaataaaagtgattaagtgaacctggaagctggagatcctcggaggcgcaggcagcaggcaacaggcacaggcggcgctgcagcgaaacgagagaaggggccaggggggaaagcgtgaaatagagaccagagaggagaacacaggcagtaaccaaaaaatgggcggatattttgtgacctagtcttagggtattttgggaaaaatataaaaaatgaagggtatataggtaacttcacccgcaaagtagggttttctaccctacttctgtccgcctctggcaggtagaagcaactcttgagcaaaaacgaaagtgattagtttgtaaacttgctgaggctgagaggaacagaagaaatggacgagatcaatgagtctgcatcaacatcggatcgtagaaaagccattagagatatgatgaaagcggaagtgcggaactaagtaaaatcgaaaagacattcgagagtggcgacaacttgatattcaaaccagaaacggagacactcggggaaactctgaagaaactgtatccagaaatcagggttggaaatggtaaattaatatccatatattaggattgaagtggaagttgtagataatgataattactgagcagcagtttgtatttataccgccatcataatttctaacatgtatgtatattctttctttgatttgtgtgcagtacggcatgacatgattagtgtgatgggatccaagtttgcgcctcacgctgtcgatccgttttggggagaaattgagactgtaagtagaaacacaatttcatactgcatttcaagaatgaataattttggaattttgagaaatgatagagaccaatagcaacttcaatgaaatcttagaacattatggtactgtttgggcgaccttatatgtaggacaattgggcctactataggctttggcaattcttttaacatggacatttacatcattcaatttcaatgttgcattagacatctaacattgtatttccaaaaatcatttcaaaatgcaaatttatattttgaaatgagtttttcagaatataatgaaaagtgtgggattgagatgtaggatacaatagcctttaacaagttatctcatttcacaagcattggcattcttaaatatagtttttgtctaatgcaaatgcctaccttttgttttgcttcgatttctctctttgtgctcaactaattgaaaaatcaattaatattttttctttcttagagcaagacgaatgaagcgtgcccttactcgctgatttttgttgcctgatttaggagaatgaaatgggtcgtgatcgaaagttgttggtgtgcctcaatgaagcaaattctagttgtttttagatgccataaattgtcatttaaaatttaaagtaaatactggctgttttagaaaccatcaaaaatcgcatttcacaaacatttcaacacttaacatttttaacctaatggtagggaccagaaacaaaaaatttcaaatatcagtgatcaaataaagaaaacaagaaaacatttattggggagtaaacacaaaatttgaatatttattaagaatcacaaatatattttcacctaaatttttaacatcatctaaaaaaaataagatctttatatttgcatgaaaataccaaaaataaagttccatagaaagaccatatattatttcatcaaaattctcactcaccaaccatatttctccattgtgattgactatcaacaggaagaaaaggaaaatcatcattctcatcccccaaaccatgttgtaaagattgacgataatggggtgttgaaagtagataaaggaaagacgaagagtttgaacagatttctgaaattttgtgggaacaggctattccgatcacattctactgatcgtactttagagcatctccaacgggagtgcttgtagggtttcttaaattgaagaaaccgttccgtggaaagcttcagcgttggaggtgcatgacgtggaggaagcgtttcgtcaaaactgaaacgcgttccttatataaggaaccggaacttgtgaataaaaaaacaatatcctcatcaactacccacaaaaagaaggagggaaactaaccatattgtggtgcgggagacggtggtggttgacggcgcgaggaggccggcgcgcgtgaaggaggagaccggcgacaaggacgacgctcgtgatggaggaagatggcgacggtgacggcgacaaggaggctcgcgacggtggcgtgcggcgacggcgttcttgaaccagaccctccgtacacggtggagagggtgaatcgcgtttgggggagagaggggaggggagttgcaggtcggaggagggaggtttttgtttttgttttttctgtttggggggaggggagggcgtgacagttgagagaaaagaagtgggtgaatggaggtttcttgaagaaggaagggagaaggacgcgtgagggagaaatatgtgggaagcaatattagagtgcaggaatcaacaacctaaaaaaatataacactctctacactattggactccttcagctttgagcctaggacaatatttttttggaattttctttttgtatccagccaatttcttcatacatccagaagtaaaatggaaaattgaaaaaacccttccttaagattcatagcatgtataacattaaaatttcttcatacatacaatactctctgaccaactgagttaataggacaattatgttaaaaaatacttaactatataacattaaaatttctaatgtatattgaatacacataaatttacataatcaattttataataattaattttgatctaataatgtattttttacatatataaattaaaataaaaattataggtttaataaaaattcatatatgtaaaaaaatatattattagatcaaaattaatttttataaaaaaatttatgtaaacttacatgtgtattaaatatacatcagaaactttagtgttatatataacgacattaattattttttaacataattaacttattacctcatgtgattagagtgtcgtgctaggtgtataaagaaatgcattgggtgtagaaagaaaatccctaatatttttaacacctaacccagttttttactaacccatattcataagactaatagaaagtgtttttttttttggggggggaaatcaaacccaatttaaattttatttcagtgtttctcatgtctgtgtacatcattaaataaaatacatattgttatcttctaagttctacatgagcaacaataggaagaagttttatcttcaaaagataaaaataagtttattgttcaatatgataaaaatttgttttattctatttttattcattttgtttccttcgcttaagtaattgtaaaggagttttttgcaaactaagcaataatgtatttgtgtgtattcctctccatatgaacataaaaatgtgtaaaacctcatcctactgcttagaattataagcatcgatcaatttattccctaactttataaaaaaaattattttcgttcctatctataaaatggcatttacatttatcatttttggtacaaaaatagtagaagagaattaagtgaaaaatgactaaaataaaatactttaagcaacgttaggggctaaagcaaatagagttaaatggtccaaaagctcaatccatcattcctctcattatattgaaccaaaactattatagttcaaatgacgcaggctagtgtgggagaccataatagcgtagaaaagtaatattgttcattagatttattagttttataaattgatggctaagattttttattttctaattttttttcttttgttttttcccctaaatttccgaatgtatccctgcatcttccccaccgtctccttcttccttcacctctatcctccccgtacagggacagggacacttgcatttgcggtgcagcggcaaggattttgcaaataaaaagaaactccactctaatttgcatctcatcgtacacacacaaaaacaaaaaactctagttcgttcacacttcaatacacataatcaaatcaccaaatcgttaaagaaaaccaccaatgacatagaagcagctgccactttccaactgttatgaagagaagacatagaagccatgaaactctaatgagatcatatttgacaaaaaaaaatcccctgtatgttctagcaaatcattttccactagtcaaaagaaaatgaaataaagtatcaaaagctactatctagttggttcaataacatttgagagtcatcatccatgttttcactgtcaacagcatcatcagttctatcagttatatcaatcttgcttggcaattcaccattgtcaatggtacccaatgagagatgcataaactttacttttactaaattttgactgcctcagcagtccaattaaaacctcagcactttccatgtcatcttgctcttgacaaagctcaaggaatgcagacaagtatgagggctttggtctccaactctctgaaccaccagcaaccataaatgcttctttcaagcaggacagggcttcagaaatcctcttatctgcaatgtggccctcagaaagaatctcccatgtatttgaatttggaatgaagccatcattcgacatctgctcaaagaaactcaaagctttatctgtctcttctttcttaacataccagcctatgagaaggtttccaattctaggatcataacttgactttactgaaatccattcctcatataatttttctgcaccctcattatcatccaatttaaccagagaagaaataatagcatggtatcccaagtttggtatacttggaaaaattgatttgtaagtattccacacacgatacacttcgtctttctttccaacacttccatataaactcaggagataatgaaaaggtattctatctcgacctttaattctaccctcaacttttcttaagcacttttctgctttttcattctgatccatcctaatgtacatcgaagccattgtgctgaatgtagaccagacaatggtaagatatttttccatttgttcaaacacttgttccatcttttctaccgatccttgagatccgcacgaagataaccagatattatatgtatagatgtctagccgtatgtttttttccatcatttcagaagccaacatatcaactttagaatattcattaaggttcatgtacagagtcatcattacattaaatggtagggcatgtataacataccctttactcctcatagtatcaaataaagattctgccttttccttcgatctagaatgcatgtatacattcaacagggcaccataagtcttcttatcttttaacttatcttccagactcagaaagaatgcttctgcactagaaactccacgaacttttgcaattaaatctaactgaattgctgcatcactctcagaaactctaaaccgctctggtctattgttcatccaatcatatacctgaaacattttctcattgctttcaaaaaattgtacatggctgataaaggcatttgaagcaaataagtaaacataatcagaaatggtaattgatttcataattcataattccatacattccaaaggaagcatgccattaaatatagtggcccaaaaaatggttttccagattattcaaattttactggcagtgtttgcaaatctagaattaacaactaaaaatgttgttacagattatgttattgtatatgttcatttatcccataaaaccaagcgccctaaataaataataaagaaagaagatttctgatatagcttctatggaatcaatcaggtcttgttgtagtctcatatagcccacccctactcctttccctggactatcttttgaaacatgctacacttttctgacaatgccaaagggggcgaagaaatgtttgtttcctcagagtgaatgatagtccaatgatgtaaaaacatatacatttcctccacaccattgacaaaatagaattctagctaagaatattctgttacagttattagaaaatatgggaaagacagcagggaaaaggttgagcagggggggcgaggggatttgctaaatttgtggcaaagatattggactttccttgcatccagtaagataaaattacaaatgatagatggtaggcaaaagcttcttcgggaaatctttttctcttttataaactgttgtggaagaaggaaacctcaattcacagatttttcggtttcctgctaatgctctgatataccttggaaagcttatgtgagaaggaataagaaacatacccagactcaataggcctgcattattaatgtttgtatagcatctatgtctttaggaggttatggatctgaattagtatgtttttaggaagtcatggaattgtgtaacaattgttgtgtggtattttatattccaacttgaatcatatgcaaatggcaatgctgtatagcaaaatccactatcatgaacaaatagcagtgctatatatttcaactcaggtatttaaagctggttatcaactactgaacttgaagaatgctgcctatttacacacaagtctgtagaatatactcatgtcatgtcacaatgaaaaaccagaaatgaatcaagctgttaatcaccctcaaggatcaggattttcctaaaaagaagaatgccatctaaattctaaattagcagtgtccaaagaaaatcaaacttcttaacacagaaaaggaaaaaatccttaaatattaaccattcctaaagccaaatgaaacatacccaaacagcaaacattcaaccctcccaccactcagtaattgattatatatactaactaaaacaatctttaccatctatgtatagttgtattcccaagattaacactttttacctcacactgaatatgccctatgtgtgtgttattatacaatttggtggccacttgtgttgctttagtatttgaaaatgcataactatagaaattagtagccggaaatgttaattcaatgataagttcacctaataatttgaccctttaaataactattttgtatttgttgacaccaaaacaacacaaattgagaatccccccagcccctgcagtgccaaaaaaaaaagtttttaatcatcatatttcaaccctaatttttttttttttgatcagcaaagataatatattatatatatgagaaaggaatacaagtagtactgaaaaagaaaaagctaacagtaagcctagcagagctttggcaacctaatacatggtaacaactcaaattaaggtgccaaaggtcaccctaggaaaagctcaccctgttggccgaaagaaaactaaaagagccaaaatgaaaacctcccctactaacaaaaaccatctctaatatgactagaccaatggtagaaaggaatattaaatcctttctccagattcgctaaccaggaccagcaaaagaataaagcgtcctccaacagcttagacccattaaagctttcattatggaaaacaatcatgttgcgatgaaaccaaatgctccatgttaaggctatccaccaaatataccacctctgaactttaatgccagtaaagttgcagtaactgtgttgaagaaaatgatcaattgggttaaccggggatgcccctaccacatttatccagctcatagattcccaccacagcggcataatcttgtggcagctaaagaacacgtgtgatgcatcctcaacaaagttacaacagaaaggacaactatgatcaccaatatttatatttctatgaaccaaattcctcttagttggcaaacagtctctcagtaacctccaagcaaaagaggctttgcaagggatgcatagcttccaaagatctttgtacacctcctcctgaccctgggtatccaacatcctattgaatagcttgtaggcacttcccaccgtgtatttaccattcggggccccctcccacctccaactatcctgctgttcaggacgtatgaccagatcctgtatttcctctaagaatttaattgctatttctacttctacccctaatggtatgttcgtctatttgtttggttggatagaaaaaggaaagggaaaaaacctctacaaacaaacttcaaatttctcccttgtttttgttccaccctaccaaacagacccttagtttttctaatacaggactaattcttatttattgctaaatgtcaactatgggaccaaatcaaggtttaaaatacggtccacaaccgcagtttttgccacactggaatcgttaatgttttttggaatttcctcaaccgcaaattctcacaatatcaataatcacaacaaaaccatgaccacaatttaaaacctgggaccaaataattagttttatgaagaagaaaaaaactgtaggctgtctggataaacttctccataaacacttttaggagaagaaaaaacaaattagcttctccttttaagctcatattagcttagcacaaattaatttgtagaagctctcttcatttagcttctccaaaaaggtgttttttcacctatgcacatggttttaaattacggtctgcaacgtaaaggtattttgtcactccgcaatcgcatcacgaccgccgcatgagccgcattttccagtgatgtaaaggttttctggctcacacaacacaacgtctataagactataataatttatagaatttttttttggaaatcgtacccaatttaaatttcatttcaatgtttctgatgtctatgtagatcattaaataaaatacatattgttatcttctaagttctacatgaacaacaataggaagaacttttatcttcaaaagataaaaaataagttttttgttcaatatgataaaaatttgttttattctattttttattcattttgtttctttcgcttaagtaattgtaaaggaatgttttgcaaactaagcaataatgtatttgggtgtattcctctccatatgaacataaaaaaatgtgtaaaacctcatcctactgcttagaataataagcatcgatcactttattccctaactttataaaaaaaattattttcgttcctatctataaaatggcatttacatttatcatttttggtacaaaaatagtagaagagaattaagtgaaaaatgactaaaataaaatactttaagcaacgttaggggctaaaacaaatagagttaaatggtccaaaagctcatttttttcttttgttttttcccctaaatttccgaatgtatccctgcatcttcccctccgtctccttcttccttcacctctatcctccccgtacaggtacagggacacttgcatttgcggtgcagcggccaggattttgcaaataaaagaaactccactctaatttgcatcttcacaaaaaaaaaaaaaaaaaaagaaaaaagaaaaacctctacttcgttcaccgttcaatacacataatcaaatcaccaaatcgttaaagaaaaacaccaatgacatagaagcagctgccacttacttaacatctgattaaccgttaatatatgacgggtgtttatcattattccatgttcttccatccatatgttcagtaataatcttacttaacatctgattaatcgttaatattgatatatcacatacataaaacattggtatgctaatgaaactctaaataacaaaatacaagaaacatatatctcatgtgtccacgcagccaatagaattgaaagcaatcccatgcaaattatacaattccctatccatcactatattctagtgggttaaggaagggatatatgaaaacatgtgattaagctaacagcagatcgaagaaggcaacaacaataacagttatttgcatcagagtgaagcgtgctccaacaacaagcataacagaaaccgcagacacaaacaaaggaaaactgaacattcctaggatggcaagccatagtgaatgaggtccttgtggttggagaagtggtttgcctaattttaatgacaagcaccaaaaaattccggggttgccaaccaggatgcatatcttcctgtgatttctggtgttattcttttaatatcttattgtattatgcttatgcttcataagattctaaatgaacttaaaagaaaaagaaagaaaagttcatacgaagggatgttactgtcattcaatgttcatccgtgaatatgttctgtctggttaatcttgatattgatatatcacatacccaaactttgttttattgttatgcgaatgaaattatgtaaataacaagattacaacaacttgtgttcaaccctgcctgaaggaaacataactacatatatgaaaactgtctaattaagttaacagcatagccaagaaagcactgagcataacagttatctgcttatcaatcccggatagcggagcggagcggccgagcctcaaaactgggatagcgggatagtggtagcgggatgaccgctattctaatatttttatataagtattaaaaaatttataatataaatatataagctgaaaaagagaaatataactaaaaattcatgcactaattatcattaacaataaaaatttttaagcaaaatatattacttagtcatcataaaataagtaaagtgtattaataataaaaaaagactataaatagcaactatccaaattaaaacttaaaagtccattaaaaaatgtaatataaaactgtagaaataaaaaaacggggtacagaaatcaaatcaggcccaaatactataaatctagccgtaaaatctgtctccttagctgctgtctccttacgctgctgcctccttctctctccttctcttcgctgctgcctccttctcttcgctgctgcgctgtttttctttctaggtcgcgccggagggagaagaggaaaccaaggccgcgtgcgcagggagtcaaggtcgcgtcggagggagaagagggagaatgttcgaggtcgcgtgggagggaggagaggaagaaggttcgagatcgcagagggagaaaatgaaaaacccacgtaaatgaggtattttttggctatcttcgacatttcacaatacccacgcaaatcgcgggcgcaaccaccgctattgcgggtgcgacgccacgtccctgtcgcggccgcacccaccgctatcccaaactgcaccgctacactacccaccgtagcggtgccaggccgcgccgctccgctccgccgctatagcggccggtccggccgctattgataactgtctgcatacgagtgaactgtgctccaacaacaagcataacagaagaagcagatacaaacacggtaaaactgaacattcctactatcgcaagccatagtgaattgggtccttgtggttggagaagtggcttgctgaattttaatgaacacaaacacaaaaaaaatgtgaaggtggcccaccacgatgcacatcttcccatgatgtccggtgttcttctttcaacaggcacaggcggcgctgcagcgaaacgagagaaggggccaggggggaaagcgtgaaatagagaccagagaggagaacagaggcactaaccaaaaaatgggcagatattttgtgacctagtcttagggtattttgggaaaaatataaaaaatgaagggtatatagataacttcacccgcaaattagggttttctaccctacttctgtccgcctctggcaggtagaagcaactcttgagcaaaaacgaaagtgattagtttgtaaacttgctgaggctgagaggaacagaagaaatggacgagatcaatgagtctgcatcaacatcggatcatagaaaagccattagagatatgatgaaagcggaactaagtaaaatcgaaaagacattcgagagtggcgacaacttgatattcaaaccagaaacggagacactcgggaaaactctgaagaaactgtatccagaaatcagggttggaaatggtaaattaatatccatatattaggattgaagtggaagttgtagataatgataattactgagcagcagtttgtatttataccgccatcataatttctaacatgtatgtatattctttctttgatttgtgtgcagtacggcatgacatgattcgtgtgatgggatccaagtttgcgcctcacgctgtcgatccgttttggggagaaattgagactgtaagtagaaacacaatttcatactgcatttcaatttggaattttgagaaatgatagagaccaatagcaacttcaatgaaatcttagaacataatggtactgtttgggcgaccttatatgtaggacaattgggcctactataggctttggcaattcttataacatggacatttacatcattcaatttcaatgttgcattagacatctaacattgtattttcaaaaatcatttcaaaatgcaaatttatattttgaaatgagtttttcagaatataatgaaaagtgtgggattgagatgtaggatacaatagcctttaacaagctatctcatttcacaagcattggcatgcttaaatatagtttttgtctaatgcaaatgcctaccttttgttttgcttcgatttctctctttgtgctcaactaattgaaaattcaattaatagtttttctttctcagagcaagacgaatgaagcgtgcccttactcgctgattttcgttgcctgatttaggagaatgaaatgggtcgtgatcgaaagttgttggtgtgcctcaatgaagtaaattctagttgtttttagatgccataaattgtcatttaaaatttaaagtaaatactggctgttttagaaaccatcaaaaattgcatttcacaaacatttcaacacttaacatttttaacctaatggtagggaccagaaacaagaaatttcaaatatcatggatcaaataaagaaaacaagaaaacatttattggggagtaaacacaaaatttgaatatttattaagaatcacaaatatattttaacctaaatttttaacatcatctaaaaaaaataagatctttacatttgcatgaaaataccaaaaataaagttccatagaaagaccatatattatttcatcaaaattctcactccacaaccatatttctccattgtgattgactatcaacaggaagaaaaggaaaatcgccattctcatcccccaaaccatgttgtaaagattgacgataatggggtgttgaaagtagataaaggaaagacgaagagtttgaacagatttctgaagttttgtgggaacaggctattccgatcacattctactgatcgtactttagagcatctccaacgggagtgcttgtagggtttcttaaattgaagaaaccgttccgtggaaagcttcagcgttggaggtgcatgacgtggaggaaccgtttcgtcaaaactgaaacacgttccttatataaggaaccggaacttgtgaataaaaaacaatatcctcatcaactacccacaaaaagaaggacggaaactaaccatattgtggtgcgggagacggtggtggttgacggcgcgaggaggccggcgcgcgtgaaggaggagaccggcgacaaggacgacgctcgtgatggaggaagatggcgacggtgacggcaacaaagaggctcgcgacggtggcgtgcggcgatggcgttcttgaaccagacccttcgtacacggtggagagggtgaatggtgtttgggggagagaggggaggggagttgcaggtcggaggagggaggagagggcgcggaggagggaagtttttgtttttgttttttctgtttgggggaaggggagggcgtgacagttgagagaaaagaagtgggtgaaggagaagtgggtgaatggaggtttctggaagaaggaagggagaaggacgcctgagggagaaaaagattaaagaaaatcaataaaaattaaagaaagcgaatatgaccgtttcaagttgaaataaaagcttaaaaaaaataacagtcccaaatatgaccgttcaaatatgaccatttaaacaaaaaaaaaaaaaaaacaagtagaaataaaagcaacaacacaaaatatatttattattatgtaaaatttatgtaatttttttttgaggtctagattttttatttatttcgatgttattgtgtttaattaattattattatgtaaaatttagttttatattgttacgtattttgttttatttattttaatttatacttatgaaaattgaaaaaatgttaagttttatttaaaaaaatatgaatatgtggattttttttaagttccttgttatttcttgcattggagcaaaatgttggatgagtttcttaggagtgacatggcattgtgggaaccataaaaaatactgcgggggccacaaaaaggtgcttaagaaacccaattgagtttcttgccctagagatactcttatgtgttgccttatatggactcctatgttgtatctgttttgggcaatcctcttgacaagttgttccaatccacaggcattgacccaatggaattaagtatggggaaagcatgttccagcacagtatgggcatcattatttttcctgaacattatttttgcagcagtgcatacctcatcattgccttttcgtataccgacatacatattgttgggattttctttactctattacattttagagatagtagttgcaacgtctggatatagtgtttcatagggtggttcagctaaaatgtcaggcctattgtttgtgtttggaggggccacaggcttaatgctacttcttagcatcataatagtggcaacataatttggaaagtagcaccatgcagcatagagcacccccatgattatgatgctaagaagtaacaataagcctgtgacccctccaaacacaaacaataggcctgacattttagctgaaccaccccatgaaacactatatccagacgttgcaactattatctctaaaatgtaatagagtaaagaaaatcccagcaatgcgtatgccggtatacgaaaaggcaatgacgaggtatgcactgctgcaaaaataatgttcaggaaaaataatgatgcccatactgtgctggaacatgctttccccatacttaattccattaggtcaatgcctgtggattgggacaacttgtcaagaggattgcccaaagcagatacaacataggagtccatataaggcaacacataagagcatctctagggcaagaaactcaattgggtttcttaagcacctttttgtggcccccgcagtattttttatggttcccacaatgccatgtcactcctaagaaactcatccaacattttgttccaatgcaagaaataacaaggaactcaaaaaaatccacatatttatattttttttaataaaacttcacattttttcaattttcataagtataaataaaatgaaatgcgtaacaatataaaactaaattttacataataataaataattaaacacaataacatcgaaataaataaaaaatctagacctcaaaaaaaaaattacataaattttacataataataaatatattttgtgctgttgcttttatttttaccttttttttttgtttaaattgtcataggactgttaatttttttttttaagcttttatttcaacttgaaacggtcatattcgctttctttaatttttattgattttctttaatctttttctcccttacgcgtccttctcccttccttctttcagaaacctccattcacccacttcttttctctcaactgtcacgccctatgcatgagctaaataaattaacttattggagaagttaattaatctttcgttcttattttcttctcctaaaaaaagtacttatagagaaaagtttatccaaaaacagacatatatatatatatatcaacatttcatcagtaaaaagcaaaaacacacaaagaaagagacccaaatggaaagaaaaaaaaaaaggttttaaagatagaattttgacctcgagggctcttcgaaatctcttgtacttcctcaactctttaacgactcttgagagctcccacttggtgaggtgcctcccttcgttctcccattggttgagcacctctgcggaccccacttgggggttttggtggagagatatcctgcggtagacgtcgttccagcgcacgatggggcggcgctcgtaatcgatggtgccgtagctgtggatcttggtgatggagcacgtgagcaccgagaggcgggggtggaagcatgtgtgagcatgggtgagagtgatggaggaagaagaagaagaagcaggaattgaatatggtgccataggatttataacattcacgtgtttaaccaacttagttaaatctctttaatacctactgcatttttagttttgactaattgtgctcaaaatatttttttgattgtaataaactgaatttatattatagaatcagtgaggacggggacatggtgggtatacccaacccctaatggagacaaaagacatgtccatccacacccctgctctattgtcatttttattcacaacttatacacttttttttttgttttttcaacatctttttgtgttaaataattatatatttgaataagattaaaatacacttttataagtctctcattttattttatattttctaaatttaaacaaaattcactttgatatgttaggatgtcttattaaatcaatttatcatataacattatattaatatatacaaaacagtttaaaagtataaacattatcatcgttattaatctatactgtatttaaactccatatattactactcctattttgcatggtatcatgtttttttaatattgcactaaaaaaatgtttctctaatatacaaattcacattgtattttttcctatccaaaggtttttattgttatatctaactacaaaaaattatattttagacttttgtaaataatatactcaccacttaaacattgattccttattaataatgaccttaataatttgaatatatattatattatttatttgcctataaaacgtgcaaaaacacgagtatcatgctagttaatacaaaaagttctgctctagcaaagagtatacaccaattaccagaattgagcgaaaaagttttccagcataaatgaagttatcccaaaccagattgttgaaccgaatcttctatatgtaattcaaaaatcagatatagctacatccgagaatcaatatttgaaatgctacaagaaaagctattgtacccatacgtacattctctttaatactgacaacacagaactgttagtaggggtcacaataccaactttcacttaatccccactacttcctcattgttaactaagaaaaaagggtggcaaaggatacccacacccttcaaacctgatgatttcaaatagactatcataccagacagcattatgggcagccaggccaattttggctgaaaatattctggttttctaaatttccatgaacatacactttgggctctttaacctgcaaagggtcaaaacagagatcaatacctttggaatgaacaaagcattcattgtttgagctggttgggaatactaatagcaattaccaaccagtaaaattggtggatagccaggtttcaggcggactcttgaaaacccatcttcagtaaataggcacttgaatccattgatcgcaggatgttcactgttaaagatcaacaaggaggtcagataaagggggaaatttcttgcaattagtcagtgagttgacatgtgaaaaatcatatataaacttccaattcaatatctccaaacattcatttactctcacacattctacacacgcaagcacagaaagatgacagaagtcaaacaacatgtattaatccaaatgccaaattgttggcagttagagatgtaatataaaatcatcatgcgtcttcactttaatagctcaagcttttgggatagtaggtccattacatggtaacatagattctatgacttattgttctagatttcaatctgtgctgcccgtaataagaagttaaatttcagctcaaggttggtgggcttgcacactatccaagcttcaagccataagggcttttgcatgaatgggtgtaattgagatgtaatataaaactattcatgtgtcttcacttaaaactaaagcttttaggatagttggttaatggcaatgatcactatgcacacaacacatgctgatgcagtccttgccaacaacacatgctcttcaagggcggatctaacatacgaagtttatcaattttatttcacacacttactcacttgacaataccgacactttctgtcaacagtttgtaggatctttcatcataaacattagcatgtgctatacaatttatatgtttgtcagacaaagtactagaaataacactagcaatatgttaatggataactcactttataagaaaagtaaaatttctctgctgaaattcttgcaagctaatttgttcttctttagaatacctgcaccagagaatagtatataagttacttgtactcggaaaatagtggaaagcagcatagtctgatcgttgaaattgaaagcaataatgaaattagagaactgtaactttctgtggatactaaatcatagataaaggctcagaaaggcatgccttcattgatccttaaaaatgagatttagtcaaagaaaggtttgtttggatgcatgcaattaacaactagatgcatcattagtacactgcaaaagaaagaagcaaaatatacctccatggaaattcactttcacaaaagcgagatattccattcatggctgaaaatgtatcaatgtgcacccaccgttcatctgtatcattatgaaagcctgcaacaattaaaaagtcaaaacaaagacaacaaaagtaatgacaaggggcagtatcaaaaagataaaaacaaaaaactcattacattactatcttctttagtggtcaatttttttatcttttattgaaatttccttctttttataatttaaatgagggggttttctggattggagttggttttaggtctcaatgactgctcgtttgacttctaattcagatgaaaggaattctgagcaagaaaagaaatcatacaaatcaaaacaaatcctgttacatcaaccaaacaccaaagaaaaaatcttccttaataccacagtaacaatacgcacaatcctttatcttttcccaaaattgacacattgttcatggagagagagaacaaaagcatatgtccataaatgtgtttcaactacaccacagactccatatttatataataaatgtaataataaaaaagatacaatctttctagttgccattcaatggacaaagaataataaatgttcccaacacaacccgtcaaagctagtgcattagctcatatgtgaccagagctagtttacaaagataacaagtaacaacttgtccaaggtccactcaaaagattggtgagcatttggattgacaaaacaagttatgatgtctccagaatggatcttttctgatagtgacaatctacatcattgtgcttggtcatgccctagaaaacaggattggagacaatatggaatgcatcttggctatcacagtaagtatgagtatcacaaacactgcctttgtattgtccttgagaaaatcagaaggaccagtatcaaccagtactgcatattggtccatgcaaaaattagccaaaaaataactcacagctttatacaccaaagggaaagctttggcatatttattatgacatgctaatttttttgctgcctgaagaataatgtagtttattctagaaatccttttgagaattgagatatatttttggaatgcgggtaagagattcagagaatgtcatacaacacatcatttaataaagcaccccaaagtcacacatcatttaatttaatccacaatgtcatacaatatgaacactcagatagcacgcatggaaataatttttagaacaataaaccatgaccaaaatatcaagctcagtactgaaccatattaaaaattgatgtttagaaattcgtcagagatccaacgggtccaacagtattaacaattttaacagaacttgccactgttgattatgaaaaatagaaactgcaactccaatattttaccaaattaagggacaaacaaggaacagtttctctctaggaaaattctagcaaaatactttgcagccaatgcatggatatttcaggactcatgtactcaccaattccatgcaattcttttaaggcatggccactaggatagttccagtatgatgccatgaaacttgtgatggtgcctgcaagactgcaagatagagagtaagtacaaaaaaaggatatatccatcacaatgaaacaaaatgacgggtgaactaacctcattaaaagtaatcccagcaaaatgaggaaaagcaagttccaaatcatctttttcttattgttgtaactgaaacatttcaggatgcatattactgaaggttagtaacttaaaaggaaacagatataattcttcaaagagggaaacatctgaaattttcatatctctgtttagattgtaaatacagttcagctcaatcatcactcttcaaatttttggcactcaactcacaagtcacagcagcttcaacttcagcagtttgtgtcatgcatggagaaattgagcagctgtgctgcattcgtagctttctctttcctattctcgactgattttagatttctagtttagatggatatattgtattcattattccaattgtttttatatgtagttaactttttcctctatcaaaatgactagatgacaatgatcataataatgtatccatactatattgcctcaccacccagtaggttaagggttgtttctgttgtcatatttaatttaaaactagtaggttaagggtttttttttttctgttgtcatattgaatttaaaactaaattaccaataagcaaaatgaaatttcatgtaaatgacctcaaaccacctaatgttatgaatgccatcaaaatgtcaaatacctttggatcatgcaaatatgcaatgaagcaaactgtcttgttgcattcacttggtgactaacaaaatgaatagaacagccatattgtattattagagcacaacccatattgtattattggagcactaaattaagcccagttcagaagaaccaatatatacagaagactgaggaagatgctttgtatattgaactaacttgctccaatatattttagcaactgcaagttattcaattttttgagttacaaaggatgatgaagaaaacatgcttctcaatccagattttacataatttaaacaaggaatatgcatgatccttgatagaccacgcaacaaccttatatgaacatccttaaggcaaaattcaagtttgtctgaaataaagcaggggcaactgcctctcaggtgctcataatcaagtattgtcatttgagagcaaaacttaatcccttggtctaatgagcttccttacaggttacacagcatcatcattcttgaagccaaaacataggttgataaacattaaaaaagttacgaatgttgttcataatccaataacaaatgagaaagaatgcatactaatgatgccatagaaacaaggaaaggaatgcacattcattcatatttcaaaatctcaattacttgctttcccataatatccattttcagttgtattttagtatataagatcacacaatgaaataattttagaaagtaacccaattagttttgacaaacctatacaatactcataaggagaacttacattctgttggaagcaattgaagcagacaagttaaatattggaactgaacttatgataaaacgaagctcctgcaatatcaatcagaataatactaaatacatgtttcaatttgaagacaaacacaaattaggcaatggatttcagattgtaattgtaataccttgtggggaagcttagaataaagcaaaatgaaggcaagaactggaaaagtgaaagatcgtacccttctgtctacaaaaaggccaaactgcaaagaagacagcatgtcaattgtcaagtaactgaagttaggatgaaaaggaggctttcttctttttcttttcccagttctttttctttatttattttatttttttccgttcgaggaaggtagcaaaagtggcgtagtatactgtagggcatgtgatgtggatcaattcacctaaagaactcatctaaggcaagagtactcctctggttgagtttaaaaatattctctaaagaaaagaaaagctaaatattgtattataatgaagtccaaataacataagaaactcaaaagatgtttataacccaaagattatgaaaatcccagtttaatataaaatcctagctatatcctaattaaatagtattaatttccttaaatgttaaatcctaatcgaattaaattaaacaggaaattttaacatgacaatattttcttaagaacatataacgaagaataaaatccctaaaatagtaagacatctctcaaataaaaggaaattcaaaattttatgagaataacataaaaaattgtaaataacaaaacaatccttaatgctgcttcattgtgcatcagtatgctaattgttaaataactaaaaaaaaaatcctttacacatgagatcccaataacaggaatgaaatattaaaccaataatgtcaataaaataactctacaattttaattgtcatgtgtatataattctcctaatctaaaataatttctttctttccttctctaaaaaatagttatgatacattttaaagggcaacagctacactaatcatacaactagcctggtcttcagcgcaatataccatgactatccacaatccaaatatcctattatcttttaaactgggttttcaagaatatacatgactaagtatatgcatttaagatatttgaactggctgaaaacaaaaagggaacaaatactttccaaagctaacaggtaagaaatattcaatattaattcatagttcaaacattaatcatagggaaaatattaatctttaagtactacattcagacagttcaattttaaggagaaaacccaaaatatttcatatttaagttacaaaatatttaaccagatcagtggaagtggaagaaaccaccatgtcaggctagaaatctacataagtaacaatgcaatcattagaggatatttgctaatccaagacttactagtgaaagtggatatgcagcaagtagtgaacgaggaagtgctgaggtgaagtaccaatgaaaagcatgtgtctaacaaaaatattgtcaaggaacataataatttatcaaatacaaataggacagtgttatcaaagacaacagacaatatgcagattttagatgatgtcatgataataagcttagtgtgccttgtccatgggcaaaacagagataaaattcacaatcaatgaagaatacaagtattagccactaaacatacaaaccctaatcccaatacaccaaaatcctcttgttgcaaaaatttactaattactctttttcatattatgtcttttaaggtaatgcacacttaagaaaattattagttacacaaattactatgataagagaactttctttgagaaaactacccttatttaaagagttagaatgaatttgtgaattcattcaagtatttaggtgagatactcataaatgagggtattgatggaaaaaaagtaaataatgctttcctgattttctaaaagtgacaaatattatgaaacaaactaaaataccccaagagacaaataatatgagacaaaggaagtacaaatctctttgaacaatccctcttgggtcacataaataaatggctttcaaagtcagcccgcacagaattagatacaatttagtattcactttaaaacaaagatctgagtaatcccaggatttccaaaagaagtagaaaaggattaccacccaaaaggaactcccaagtatgtgaaggggcactgtaaagtttcacaacatccagagaagcaatggaagaaagaacttagctattcacaattaaaccagccaaatcactcttagaaaagttaacctaaaaatcaaagataacttccaaaaatttaatagaaagaacattcccaaaggtatcattatcctctaaaaagagaagtgtatcatcagcaaacttaagatgaagaccataacctcctctaaatggtaaaccaactctaatatcctgaatgatatccctatccacaaacagcaactgaaagtattcaattcagaacatcaacctctaaagtgaacaagaaaggtgacaaaagatcttgtctcgtaactccttgttaaactagggcttagcctcatcattaagtaatatataaggtagcaaacaaaggcctgtttggttaaaatgttatatgctttcacaaattaatacctctattttcactgtttcctgttttcaatggtttatacaagaaatagtgaaaatgggtttttcttctcttttttcctgtacaaacaaatctttggaaacaggaaagaaagtgaaaacaaggtgggaattttgtaattattagtgaaaacaaaaaatgttttttcaaaccaaacagaaccagaagaaaattaaaaaataccctggtcatgaaatatgtataacatgtatttcatattctacagctataaagttgttcaatataaacttggtgaaggatactccccattcagagctcttgtttagtacggagttaaaccaaaatacttcaaattcaggccacaataatcttttccacataattgaatcaaccaatatggttaaacctgtaatcagaagaccataatgttagaatcaaattttaacaatagcatcctatcatgcataaaattttgattttatttaaataacagattaaaattaaagtaaaaaagcatatgtcaccaacctatgcagaagagagccatcccagtgcagtgttttagagcaccccacactgaaattttttttgtcttcccttcaagagatgaattttattaggcacaaagcatgatcatgttaccataagtatggaattttcagaataaatttcaattttataataattcaaccaaaattgcaaggtcagaaaatgaggataagaaaattcatcaaacagcactattaacttcaaatgccaaatataacaaacattgttatccaaagattgataacaacacaagcatagttaacgcaatgaagttctatatttaaatgttaaacaaaattacacagagtcacaagggtcttacaaattggcgtagagtccaactcaaccttacaaactaacttgtaagatgaggattgtccaagctttataaccatatctttagtcaatgtgagactaagcaaatccccttgaggccacaattaaggtagcccaaagaggccaggccaccacaattaaggcaggtgatgagtcgccacaattaaggcagctatccaacacactcctcacgcccaagattggacatctagagcatggacaaatgcaagtatcgcaataataacaccccctcacacccaagacacatctggctggagcatggacaaatgcaggttggccaaaaattggattttagataggatctgataccatcttataaatttataatttgggtttaaggcttaactcaaacccacaaaaccggtttgtaaaatgaggattgctcaagctttatgagctctctttaagtcatatctctagtcaaaacacccccccccctccccggcccccccaaaggctacaattaagacagcccaaagaggccacaattaaggcgggctaggggtgactgaaattaaggcagctttccaacattgggattctatggtgacccaattgaacatttcaaacacatttgccaatcatcctatagcctctgagatagtgacaaagcaacaaaaattctcatgaatgcaataataaccaactcataaattggtagcctttaaattgaaatattcgataagataaaagtccaaatcagatttaatttaaattatgctgggaaatgatgatatcaatattagaactgttgccaggacagctcaatagaatttcttatctgtttttacagaaaacgtgatcttcatttcattgtcaagatattgacatcagaagtccaaagttgatatggaataaatatattccagtaccaggaaatacttgctccacttgtcaaactaaagcataacattattaaaatcaagataaagaataggatgcaatagtttaatagacacggagagtggtgttggaaaataagaaattcaagcatccaacagaaaataatgagaatagccagattttttaagtttatcaggaaaacaagaacaggtacaagtagggggaagcatcataactcattagatatcctccaaacaaacaaattaaagaattgacaagctctctatcagtagctcaagaatttaaggagaaaacggaaaaatgaaaagcaagttacagaaaagcacaacgtaccaaaagaagttgcagcccaatggggcaaagaagtaacagcatgtcacatctgagtacagttgtagcaaaaatctgataatccaaatgtgcaaagagattatttcagaaaaggcaaagcatatcaagcatactacgtattaagaataaaaagggccaactaattccagaaaacattacttcctgtcaaactgtgtgtgcgtgcgaaaagatgatatattaaactagtagaaatatttttaaaaaaaaaaaatcactttcataaaatgatttcatttcaaacttatcgacaacaaaacaatgctaaaatatgtacccaaaaaaatcatactaaattctatgattttaaataaataataacataaataatataaagggtaagtgagctactaattaagaatgttatgcacattgtataatccccacatctagttcaaattttaaaaaatatttcaggaaggttataggccctgataattcagtattctcgtgtttcagctaaagacattctgagtgaagcagggaggtgggttttatttcgttattgagaatggaatgtatagagagacatcattgatcaccccttaccaattgcccctccactctaaccacacaccaatgacactgcactacattcatcacaccgcaacctacactactctaacaaccctctttaggagttcatgaatttttctctcacagttgattaggagcaaaaatatcatatatatatatatatatatatatatatatattcacaagatattcttgcccttacaagttttcaaaaaacatctaaatgccatgtacagtccacttttaacacttacaaaatattataaaattgcggataaattttatttttacctctattctggtcaaaatggaccacgaacatttcattctcaccttaattgtaccttcacccctttctttctaatttctctttcctttaaaaaagttggggctaagaagttgcatatatttatatgcttaagaagttaatttcaaaatctctttcattaaattataagctattaactgaactttgtagcatatgcaaaaggaggagagtcatttagttgtgcaagagactccaatcatagaaagtcaaatcaagggcattgaatttgtctctgtgagaacaaaatgaaaaacatagatgccgatagaccctactaaataataatcattgggaggtaaccaatactgcctccacagaattcacatgtgttattacacaggcaactagttcacattgacatacacaacacacaatacacatacaaatgagaattaagttttgttaatctaatggaataggttcggaatcaaatattaagtaaatatttctgaaaaaaaataaagaaatagtatccatgtaactggccccacctaatggaaaaaagcttggttgttgtaaacttgataatatgagaagttggacttttcttttttaaaaatagcaatttaacggtaaaagactagtttaaaaaactaattctgagacaatatttaatcacgaaattctggcttggcaaaatatgtatattatatgaagtgaagaaaaaatacataagagcttataatattcaaaagaaaaattttgtattgagatgaacctgaaataaaaccacaacatacataccagagagtttagagctgcataaaaacgtccctctaaccagtatccatatgctaaattcactgcaaaataaatcaagagaaagcacagaaccatgaaattgactagaaggtttcacactgccattcatcattaaaaacaagaaaaacactatcaggaatattaagaagcaaaacaagctaggtagtttacctaggcccagagcaagaatgttgggaagcggacgggtacaatagaacagaaaatgaaactgagtggcagttaatatcacaaagaaggcttctacttgatgtccaaacttattccttatctgcaaagcatcattattagaatgataagaaaagaaagtttgttgcttccttatgaaacttggaacaactctacaatgctctcaaatttggtgccatgcacccttcagattttttttctctcaatattttaccagttttatccttttccaaagttttaatcaatgctcaaagattttccaatgccggcaagcagacaaggtgaaggaggcacatgaaacattccattggtgacacctagttaagcttttatagagatgaattaggacagcttgaacaaacactgataaaagatatgcaacctacataaccaagatttttgccccattgcttgagaaggttcaaccacatttgagttcctcactaaattttctaatttactcctttgtttgattaatctccttttcatagtcatgaagctcactgaagctctggcgaagctttagtctttagagaacattttcataattttaaaaattatagtactacatgccaaataaattgagataaattatctctactgttgaattattatttttatatgatcaacagttagacatatttgtgcatccatgcaccaaatatgcaagggtgcatgatagaagtattgaaacttgagctttaattggataggtataatatcagagagttgaataaacactacttcataaataagtaaaataaataaataaatttacttgcttattgatgatccaaaggtacatacctgatgtcgaaagaatcttagtgtgtatagtattatgccccctagggccatccgaactagacatcaacaataagacatattaatgtacttcccaccacattctcgagtaacagagagcacaggagaacaaaaattgacaccatcatcttggtaattttgagattttgacatggttcatgactttatactcaactatgaattgtagattatttgatttgatttgatcagacaattcaattatgtacatataacagagacatttgcctgtaatgaatgcttgtgagactaacagactgatgcaaaacaacatagagaccaatggctcagtgaaacaagtacgttatcagaattaattttcgagctattattttccagctaaagacagtgttttagactttcaacttctagtgtgattggtttcttatctgcacaaattcccaggcatccaacaaaaaagtaataactagatacttcttggcatatgtatgccgggctcctcccaacaaaaaaaacatacacacgtttgatcattagcgccagtctttttttcaatttaaaccaaaggaaaggagaaatccagagggggaaaaaagataaaaacagcattccctgaaatgaggaacactaaaatatgcattgattgtcaagtatgaaagaaggatacatacctatgagaagagcataaaactttggcaaatgcagcaaacttgcagttaacacaaacggtgatgcaattattgacacaagcaaagcacctaaaacaaaataacaataacacaattagataacatataacaatataacaaagagagaagtactacactagcacacaccagcttataccgaggaggcatggcaattgtaaaaacgcaatcttaacaatccaatagaacatcatcaggttaaatttccagcactaaaaactaaacttgaataaccgttgtaacacatgctagtcacaaatcacaatctcaaagattattaaatggattcattcacatcaggcacacaagcaatgcaactgtataaacgagtccgtaatccttatttgcttaattcttcacaaagtaaattatcattttccataataaatcacaaaggtctgagcagtgctaaatatgaaaacaataaccaaccaaaaactaaatgaataaataaaagacttaaatatgtttttcatacttgtaatatactcctttttcagtttactacctaattatttatttatttatttattttactatttgacatttttaaacttttacttttggttggtacttaccattactctaagtttgttaagtgatgatgtgacactctgttatgagattatcacttaaccgatgatgtgctagtgtgttagtttgtcacaacattacttaacggaccacgactaacagtaggtgtcaaaagcaaaagtaaaatcataataaaaaaaaaaaaataggtaataaactgaaaaagagatatattaaagatatgaaaaacatatttaagcttaaataaaaatacatattttgagagaaaatggctacaaaacacaaaaacatacctaggaaagtccgaggaaccaccccagggaaatccagatgatcatactattaacagaaacattaaaaaaatatcaattatatacaaaatacaataaactaccaattaataaaaaaaatagcaaagacacagtgatctcacattgtctaagttcagcctgtgatagagaatatcgtgcattgcctttagggaacacaaaggaattataatttataaataaataaataactaataaaaataagcaaagaggtcgaagaagatgaagagagagagacctgaacgttgaaactctcttcgaccttagtgtaaggcacagtgagtacgtagacagcagcgattgatcccaacagaaaatcgtaaccgtatcgctgcagaaaagtctccgatttggaactggaagccattgttgtgtggtgtgttacagagtgggcgtagaatgccagagacgatacaaaaacatgaagggagctactaaatacactataacaatttcttatacgctatatagctacagtgcatttccacaattacccttttaattattttcattaaattaaaaaaatttgaatagctgaaggcgcttttacgttttctctgtccatctcccttcttctcctacgccaaggtacagtgcattcttccgcaacagcttcctctccggtgcttctccggcgtcgttgaaataggcagtcgagcagcattgttggtccggcttggtggtcgggttggtggtggtggtcggtgtttgcgtccgtcgacgaaggtgaggtagctgttaatggtttggtgtcgaacggattgataaatctgtgatgatggcacggattgattaatccgtaagaaggtttgaaggtgcatacggattacttaatctgtatgaagcctgcggtttgtgcaatccgtaaagtccatatggattacctgatccgtatgaagcttacggattacacaattcgtaaggcctatacagattacctaatccatatgcaccttaaaaccttaagaactattttaaatttgtaaaaatgtgattaatttatgtatattaggatgttgaaatttgaatgattgtatatggattggtttattagggaaaataaggcagcattgtatgtcatatatacttgcttgtgatgtatatgtatcattgacaatattacatgtagttatatgatatttgatatttaaacttattataaagttaaataagaatgactgaatatagaaattaagttaataaaaccataaaggacaataatatgttgatattcaaggaagattaatagtagtataagttaacattttcattttcaagttaattcacattggtgacttgtgtgcattgagtagacacattgttttatggtgcagttataaccaattattgaattactagatgtaataagttgggagtgtgataagttgggagaggaatgaaagtaatgatgtcaatgcataagttgaagccttaagcataatgagttgaatattgtgggcaacaaagttaacaatttgcatgtcattaatttttgttatatggaatttggttatattttgattaagagttcaaggaagtgaaggaaactagatagattcataatatgtaaccaatgctatgtatatatgtttgttatttgtttgttttaagtttatgactatcttgattaacaaatggtagagattatggcaagaactagaggaggattgcgtcaggctgtagaacagggcggtgaacatcgtaggcctatcgcatccgcaagaagacaacgggcagctgagggtgttcttgaggaacctgttgttgaggaacgagttctggagccagaacatgtaccagtgcatgaggatgttaggaccgagtctgaatgcttcccaggtgggccggaagatccttcggttttgacagattacgctaaccatgtcccactgagagtgtgggctggagaggtattgatgtgtttaagttaatacaacttaatagttatttgtctatgtatgtgttgttacttacatacattttttcaggaacggacagagttaaaattggcatcccatgggtgtaaggtaacaaagtttgaaaagccaacacttgagattgaggggttagtcgcagctactgggttaagcccgttgatttcctgttctgtggagactggtgacaggggattactttctgcgtttgtggagcaatggcaccctgagaccagtagctttcacttgcccatcggagagctgagcatcactttggacgatgttgcagagttgttgcatctcccaatcatgggaaacttgcagaagtatgaggtaattgacgtgggggaggcaataacattccttgttgagttgttggaagtaacagtagaggatgttgaagctaagacagaacaatgccacggggcatatgttcgattgtcgtggcttcgtgaattatatgctgccaagtgtgaagctaggcagtggatactaattgcgagatcttacttgttgcatttggtggattgcactatatttacgaacaagagtgtcacacacatcagtgtggtattcttggacgcattctatgatcttgattaatcggcggggtatgcttggggtgcagccgcactagtacacatttacgacaacttaaactatgcatcccaacatcacgagaaacacctaggcggatatatttcattgatacaggtaataagaacacatgaatattttgttagttaagttatgttgacattaatactatgaatgttgttaattcattttatatgttgtgttgcagtgctgggtgtatgaacatttcccgaccattgggaatgtgatgccaaatgcttagtacgaagagaggtttccacgtgcatgctgatggagacctgcgaaggctttaccagtttcaacctatcgtaggcggctggataggttgacgcttgatgatgtagtctggacgccttaccgggatcaccgtgcacatagggatttcgagacgatttccttattctctgggtacattagatgggggccacacatggtacgacatttaccgaatcgggtgatgcgacaatatgggtgtgttcaaaagatcccacagttgtctccggctggatcattgtccactgaagatattgatgaccgatggagtcacttctccgagtacattgttgccactgacaatttggttacatatcctagtcagtgtgttattgagtatatggggtggttctatcgtgtatcacatccatttatgagcccgacagagcctggagagccgccacaacatcctttgaggatgactaccattttacattatcaccctgatcctgctccccctgccagccatgacgatgacacacaatgtccatcacatgcagatgacccaggttcagatgccccaggttcaaatgttggtcacatggctccacatgttgtggtaaaagtttgaccattttattttttaaaagttaattgaagtcacgatgcaatattgattgactattactgtgctatatgttgtgttatattgtaccagagtatgtgcgagaggctagcagacgggttgcaacacatgcttgacacgcaacaagttattcctagaacggaggcatatttgtgtcttgtgtgtttatttttcagagcaccttttgttctaaccttttcagcgggaggattcatcaatgtttgatcaggaaaagcaatttctttaagcttagtcttcatcgtcaatttcgcacacaggtcaagattctgaaaacaattggagattccctatatctcgtcagtgatgtgaatttccatgtcatccaaaccttggtcagaaaaatttaaacttctccaaaactggtgaatgcttgaaagcgatacgctgccaacaacaactttagctagctgacatgcacaagggagaccataggtagttctcatgacacattgttagacttttggcaagcgtaccaattgtcattgtaagttacaaaatttataaaagtttgtcttcataggaacttgtgctactcagttaatccaacgagaatttaacaattcaatagttatgtacaagtaggatgagcgaaatttcatttgtttaagaaagtaacggaaaataactaaacttagcaaaaatgaaatatacttatgagaaagtgggattggatttcattcttatccttagtattcaatttaacctttaccatgcataaattaatttctatctttattgatgcacactattttaccccgaattgatccctcgcattcgagttctaaggatatctaccgaatattgatccctcgcatatgaagtaaatacccagcattaaaatcataatcgcgtgctttatgcaatcagaacgttatgccctattcctagcaacgtaacgtaataagtaaaatcattcggttcaaacccctaagattactttccagtctcacttagagttaaattcatgaaactagtgatcaagtagaatcaagcattaaggacagaatgaaattaccaataaggaatagaaatgattcatgcataaataagtattaaaaaagagacattgggttaagaagattacatccaatcctcagagaagctagctactcatagtggagagaacctcttcaaggaaagaattgttgaagggcctcatcaccgcttctctccggcagagtctccacactaatcctcacttctctcactttcctaacctacctacttactaatatttaagctcctaagcctaaggaacaacaaaggaagcaagaatgaagcaaattggatgccaaatgatgcaaattcgttggctatttataaaatccatgacccgccagcttccactcgcctgggcgtccattttggcctgcaggagctcgcctgggcgagttaaccctgctttcttggaacatgatgtcgcgcaggcgagccaaatacacatggtttggtcgcctgggcgagttaatgccttaactataataaccctgaggcctggcgcgggtggcgcggggatccgcgcggttagcgccagggtttctaaagaggaaaaccctgtctgtgatatggcgcgggtagcgccgggttggcgcggtcggcgccatagcttctgggatgtggcgctagtggcgccaagctcacgcggtcagcgccacaagccttccagaaaatcaattctctctggaagttggcgcggacggcgccattggtggcgcgagtcgcgcggtaagtgttctggaaagtgtattctctctggaaactcacgcggatggcgccagggtggcgctggtggcgccattcgttttaaggccagcgcggacagcgccagaggtggcgcgggtcgcgccacaagtggcctggaaaaccattttcctctggaatccggcgcggtcagcgccatatgtggcgcggttggcgccatgaactttgcatgtgtggcgcggttagcgcgggacgcggcgcgatccgcgcggcacgcctgacagagttggtataaaaagggagatcgcgtttttcagggcaaaaactcatcttcttcttctttgagcgtcccagctgccattgttgaggctccaagcttcaatattgctccatagttcaccaaatcaagcctttcaaatatcaatcttgatggaaaacacctagtgagcttaaatccctcatccatttctcttgaaaaaccccaaatttgagaatccctttctctagggtagttcttggaacttgagttcggcgaggaacggcgacaaatcgtgagtacccaagctaggggaagttgctattgggctttccttgtcgtcattgaggtaagaaactcaagtttcaccgattattttgttgattggggttttgggtgaatagtgacccactgttgatagagcttgaattagctttgggtcctttagagttatgtgtttagaatgggttggggatgaaggattagctctcaattgatagtttggtgaactttggattgttggctctatgtaaggcatgtattgtggtatatgctgaagtggttagtttaattgacatgttagagccatagtatgtgttttgttgtgccttggaggccatgaaaacagtgccattgtgtgtggtgagccgttcaagcccggtgtgaattctgtggaattgggctattgtggtgagctttgagctctgtgagttttggcagggccaaactagacctgtgagggtctgagaatcacttgtgaagtggttgagtgtgtgctacacactggggcatatgcttcttgttgttttcgcggcttaagaccgttattgaagcattatatgttcaataatatgtaggacgtgagattgaaagtctcagtggtggtgatagtgaagccgggagggccggtgctttgctcagagcaggtaagctcttgatccttgattgtatgccctttgttatgttctaccatgcaccatgtttgggtgatggttctgttatgggcatttgcatgtatatagaaattgtatgttgatatgcctgactgatgaatggagattctgaaatccgtgatgggatttgttattgaaatgattatgttgatgtgattgaatggcaaattgtgatctgaaacccgtgatgggatttgttatggaaatgatattgatctgagattgctgagatatgcttggacccagtgattgggaattggctatgaatggttgtgcattgttgcatcatgttatgcttgattgattatgaatatgaattgtgaatcctatggtagtaggatagatgacgagagatgagtaagacctgatgtgagatgttcctgtgatatagatgtagcctcccgaatgaagatgttcctatatctacagatgtagcctcctcaggcaattgattgatgtaggatgtgagatgttcctgtggtctagatgtagcctcctgaatggagatgttcctatacacagatgtagcctcactagacggagatgtgcctgttacatagatgtagcctcttaagtgagatgttcctatgtttcagatgaagcctccaatagagatgctgtgatccgggcaagagatgttcctagtatatagatgtagcctccgtgagtggagatgttcctatatacctagacgtagcctctgccggatgatgtgctgtgtaccacctgtttgtagacaggatggggtgataccatagaagtggtatgtgtgaaggggttgagaccctgtgtgatttgatgatgaatgagaatgattctgtgaatgatgagaacgtattatttctatgtatgtgcctgaaagtgaaccaggggaaggaaataccttcaagggccctgagtttactgagattttatatctcaccccttgtgtggggcttgtgttttgcaggtgaatcatcagcaggagcagagagatcccaaggcaagaagcctatgcagggatagttgctgattcaaaaccctaggcttagatgatatgagcgtgtggctcagatgttttgtatagcctttggttttgattttgtgtaccctgaggggatattgtgtacagttttgtacttaaacagtgaagttgtatatgaacaccatattataatgtaaagcgtgtatgcttatggcatttgttgatgccttttgttatattgcttccgaactgcttaatctctgatgtattatgtctgataatgatagtttatgcgtgttaaccacccggtgcgtgtaaggggtgttacattaaccatgaagaattctttgggctttgatggattttgggcctggattgcttgtaacacctcccatgtttgctatgtaagccctccttgcttgctttgcttatttggaagcctcggaaatccacagaatctatcaaaatacaaagcatgatttggattaatcttccaaaatatgaacaacaacttttatacaagcactaggtgttatttaactaggtttaaggcaaatttataatcaaatcttctgaaatcaaaagataagtgtttgcatttgaaacatgaatttaactgaattagggcagttatcacacatccacaccgagcaaggcttttgcctgcataatgaactcgctcaaacttagcagcaatccggttcaatgcatacctcgacaccatgccgataagtctcttgtacaatgttactttaaaaacatgtccgatgacatgagtgcttctttcaattggtgcttttatttcagtatgttgcaacgtgatcatgttgttcatggaatcccaaacagtacataagtctccaacgctattttgtagaagcatctttaaagttcaatgagcagactcaaccttgcatttagtgacaacatgttcatactttaaaaaaaaaaataggttgttcaccaatagacaatgtcaccagctataaatattttgttacctgtttgttgtagtgttgcctagatgcattactttatttgtccaagcggttacaaatttttccttatgaggatccaaccatgtttctttcacataatcaacaaacgcaggtcatggcgcacatgcaacttcaaacttcttcaaacattcatcataagctttctcagtaccacaaccaataagagtcccccaagcttccatgacaaagtctcatgccaaattttggcgtatgtaaggtttacactttcccttgacattcttttcaatgtgaaattgacacaataagttggttgacattggaaaaacaattttcacagcagtcatcaatgctgaatctctatcggttacaatgacttctggaaaaaattcacttttcagaaaaatccctctaaagtgttcaagggcccacacaagattgtttgtctgctccgcctctaaatagacaaatgcagcagaaaatgtcataccagtagatgtcacaccaactatgtcaagtaaaggaagtctgtacctgtttgttttgtatttactgtctatcaagaataccacatgatatgcattgctcaatttcactaagtctggatgtgtccaaaataagtcacgtaccacattttcttctttcattctatgccaatgaatatacatgtctcgttcaagaagcttcattaactgttgcatttcagtgttatcacctcttatctgcgtgtggtatgcataccttgcattgtacacttgcttcaaagttgtataattattggcattgtactccttcaaagttaaaagaatattctttggttttaccatcgaccttgtcatatcaacaacaatgattttctcctcctcagttagccgaccagcatacgcatgtccacataatgacctagccaaactatgattatgcatgccatatattaatttcactacccacccttcacctcctgggctcagcttaaacggacattcacattttctactgctacctattgtagatacaaaatcttttttgaatgatctatactttccactcctttgacagccaattataacgtatgatgttgttcctagttttccatttgtcatgtcactcctcattatgacaactacaaaaccattatcaaatgcaacacttcgagctcatttcaatacatcctcacgggaaacatacacctacaaaaatggaacattcattgttgggtattatcatttgtatcttaatcatttaactactttaactacatgctaaatcaaatatatacctcgtcggtattgaatgctaccgaacaatcaactgaacaattaatattttcaaacgcatcagctttttcaccaatgtcttcctccatattaatttcttcaaacataatattgtcatatatccactcgtcgttgtccatcttaataaataaaattaatattatttcattttcaaagcatacacataataatattcaaaaacatacggatttatacgcattaaaaacacctaaactcttttattttaacttataaacaataaaattctttctaaaattaaattattttttaaaaaaataatttaagcctcatacgaattactcaatccgtatggtctacacggattagtcaatctgtatgaagcatacaaattagacaatccgtaaagaccatacaaattgggtaatccgtatgaggcttacgaatcggtcaatccgtaaacttcatatggattgacaaatccttatgaagcttacggattgacaaatccgtaagctccatatcactttgctattacggattacataatccgtatcatccatacggattatgtaatccgtatttcagaagaaaaaaagttcaaacttcttaccttgcacccactgcccacgatggcctcttcgacgactgccaccgctgaacaccgctaccaccatccccaactacctcctccaacaacaacacctccaatgcacaaccacaacacgatcaagtgagcaaacaccaacaacaaaccaaaacaagtgaacaggagaaaagcaccatatgtaataaagcaactgagggcactattgacattttaaaaaattcatatagtgtataagaaaagtatatagtgtatttagtaactcccaaacatgaaatagtttgttacgggaaagtctttatacaccatcttaaagtctaatacaccatttcaaaaataaaaatggcaaaaatacccttccttgttataaacagttggaagcaaccaaggcctatgcaattcgttttatttgttgtttgaagtttggtttttggttgtgtttccagctttggtgcttttgttgtttgagtgggtagttttggctggtcgtggaagctgttacagttgttgggttcgtcggagtgcgttctggtggtggtggtcaggggttgaggtaagttttatatcatttacgaattacgtgatccgtacggattatacaaattacgcaattcatatatttcatataatccatatgaaacatacggattgcataatctgtatgacccatacagattggttaatccgacaaagtaacgcataggactatgtcatggaagcctgagggagtgttgtgggttgtgctaatgagaatcagtatgctgattgtgttacgaagtttgaagttgcgtgttcgccatgaccaacgtttgttgattatgtgaaagacacatggttgaatccacacaaagaaaaatttgtaacagcatggacaaaataagtcatgcatttgggtaacacgacaactaacaggttagaaaatctttcaattttttgaaattgttaattgaatagactcgattttggggattgttgcttacctgaatcattaactacagggtagagtcttctcattggaccttaaagagactattgcagaatagccttggagacctttgtagtgtatgggatgcaatgaacaacatgttgaccttgcaacatactgagataaatgcatctttggagagaagcacgcatgtggtcggtcatgtgtttaaagtaacgttgtacaaaagacttattggcatgtctcaaggaatatcatcctccacacatcggtcctgaacagcaggcccctcatcaatagtagcccctgcatgtcggtccagagccagtggatcctcatctatagctgcccctgccctttgtcttctggcagatgccgtagtcctacaacgttcaggggctggctcttcattcccactatcatctctaccaataatattgtctacaactcatcttaaaccgcgacgcatgcctcttttattaaccataacttgtggtaccatttgctaaattgttagtctaacacctcaaaccaaccaaaacgttaataacaacaaactacttgcaaaacacaaaagttgaaaaatttaacgacatacatatcagagcaaccaatccagatatccaaataattaatatattaaatttgtaatcaacttagctattacatattacttacttaaactactttaggttttcagccttcaatgatgttgtgcatataaatgttaaaaaggtaccacaatgtgtgattaaactaaacacatagaaaccacttgcatgaacctatccgcaagcaatgtcccagtccttgcatgcaaaagttgttttaggatattattaacaaactatgcagtccacaacttttattaattgacatggatacaattctaaggccaatgggtttcactgataacttagcagtgctacctctattcctaaggcctaaacaatcagtgaacctctgttcctaaaacctaaacaatcagtgcatctctatacctaaggcataagctttcagtctctttctcatcataagtttaacacatgttcctttttacatgatccctatacaacaataatattataaagctcctatgttttctaatggctaaaatataaaacataactgataagcaactaattatataacattgatgtatacaattaaaaattaaatctaatttcattgaaaatttaaaaaaaaaaacataaatacagatttctcaatcggtatggtgttcacggattaatcaatctgtaagcatcatacagattactcaatccgtaaggagtatacagattgaataatccttatactacttacggattgagtaatccgtataatggttacagattggttaatctatgaacaccatacggattgagtaatccgtatgctgcttacggattagttaatccttgaacatcatacggattgagtaatctatatgatatttacggattaaccaatccgtaaccatcctacgtattacacaatatgtggcatccataatctgtaataaggcgaagacgaagaagcactcaagcggatgacagaagcgaactccaatcaatcaatacaacaactcaatgagcaacgaccaccaccaaattcaccgcaggtgaaccaaaatgccaacaactgaggtgcgtcaccaaacaggagaagatcacagcagcatgaccaggtgagtgaagggaaaatcaacagtgctttaactgtataacaaagggcatttacggaattgcactgttcaggtctgggtgtatcagacttttactgggtggtaaagactatcccctgattttagaggtaacaatataatgtctgattctattcacgggaacaatttatttaataaaaaaaagaatcatatttgatttctattgcaattttttttatcagtgacacagatacataatgcaatttggattagcatttgaaaaaaaacaaactcttttttttaatcacactactttttaataaaattggatcatgttaatattttatcatatcttcttatatatcaatatgatatggtgataaagtaatttatattaaatatttatataaaaaagttttacattgataatatatatacaattaaactctaaaaaaaattaaacctatctaaacaaaacttttttttggtcatcttttttttaggtaaataaaaatttctttaaatctaaaagagttgacataatggtgtaagatttcactttgtttagatgaagggtctatttagtaggaaaattcgtgtttgattcttaccttgtgcaaaatttcattgggttagagatagtcacacatcatgaactagattagtcttttgacctagggtctgtttggatgtaagtttctctagaagtacttctaaaaaaagaaagtaagaagaaaaaaatgaaatgagttttttataagctaaaatgagttttccattagctcatttgtagatttcatctcatcttttagagaaactatattggtgagttttaaaaattggctaattaagagcttatttttacttatgggaaaactcatctcgttttttcttcttatattcttcttttataagtgcttctaaagaaacttacccaaacatgatctaatggattggaaggcacccatgatctttgaccccaaaaaaactctcttccaactcctctctatttagaaaatgctctttttatgaaactaaaggtttaagtcattggttcgagtggtagtagacttatccccttaagcaacttctgaagttgagtcttatgaatgaaaatatgtgatcggaggagaacctcactaaagatggttatttaggtccttggacaggagattagtcatcgataaaattaatagatatttcatatcaataatatggttaaaaaaaaaggttgagcccatccatatatttaagctatataatttattaatgattaaatagttaatttaagttttgaatttgtatcttgttattttagtttataaaactaaagataaagagaaattaaataaatctctcgaaattttcttaattttttttaaacattgaaaatatcttcttcttttttcttattttcatctgtaattcagatacttgaataataataataataacacaagtttagaaaccaaatgaaaaaaaaatgattaatttcaattacttaaatataaacaatttcaaaaaacttatttaaaatttgttagttttaagaactaaaacaacaactagatataaattttaggaattaaattaatcatttaatttatatcaatgataattttcttgtcaaaaaatgaaacctcaataagtgtttattttgccgccactatttctttatgctaagagttgctccaaaacctctacgatggtctgcgtgcgtcccaacaacacggtgacgcatccgtctttcaaatcttcttctgaaatgcaaacctccatttccccttctctctgtcttcaccctcactctcactctcactctcactcgttccttccttccacgtgccatactctctcgctctccgcaccacaaagccacgcgcctccctctccgccaccgctactgctccaccccaaaccaccgcgtttcgattacgccccttcctacgagacgcgtccgaactttatatacctcaagcgcgggaaggtggaacttgcgcgccaagtgtttgatgaaattcccaaacgagacgttaatgcgtggagtaccatgatcaccggtttcgcgcgcaatggaatgccgagggaagttttggagtacacgaggttgatgttagaggaaggaataaatccaaatttggtggtaatgacagctattcttgatgtcataggaaaaattggtggtcgaaatttaggtagggaggctcatggttttgtgttgaagatgaatatttattacaaggaattgtcgattcaatcggcgttgattgatatgtattggaactgtggtgatgttgcctcagggagccgggttttgtatagtgtgatgaagaggtatggtgatggttggattggattgatgtcgggtagacttgaggtggaaatgaggtctattgttcggttgaagaggttccggcctggtgctgttgcggttgcttctttgcttccgatttgtgcacaattgagggctctgaagcaagggaaggagattcatgcttatgctttgagacattggcttctgcctaatgtcccgatagtgtcttcgttgatggtgttgtactccaagtgtggcatgattgagtattccttgagactgtttgatggaatggaacggaagaatgtgatttcatggaccgccatgattgattcgtgtgttgaaaatggacatttgtgtgaagcaactggtgtcatgaggtcaatggtattgacagagcataggccggatacggttaccatggctaggatgttacgtgtttgtcaggggctgaaagttttaaagcttgggaaggaggttcatgggcaggtattgaaaagggggtttgtgtcggtccattatgttgctgccgaactgattgatatgtatggaatttgtgaagatgttgataaggcaaagttggtgtttagtgcaattcctgtaaaaggctcaatgacatggagtgctcttataagggcctatgggtacaaagaatggtatcaagaagcagttgacctttttgataacatgatatcaaatggttgctctctgagccgcttcacttttgaagctgttctatctatttgtgatagagctggatttgttgaagatgcttttaggatatttgatttgatgtcgagatataaaattgatgcatccaaggaacactgcacttgcatgattcgacttcttacccgctatggtaaactagatgaggctcaaagatttgtagaaatgagttcttccttatagcagagggcgagaggcagtaggactgtctttttctcctttgaatgttctatagattaatattcttaacctatttttattgatgagttaccagtagctgttcaaggtgacaattttcagctagtgatctttaagttgtaagtatagtgtcatactcaatagcataactgtatcaaaattgtaaagttgcttgaattgaacatagaattggtttgctagaagcaaatctattttttcagttgccatttgtcaatgtttaatgatagactatacccggcagaaacatactggactgatgcaataatccaggaagaggaatttataactgaatattatggatgataaataatatcattggtattatatatgcttcaaaaatattcctagtgaggagtttataacagaaaaccttagctatttttggataaagaatttaagtttgggaatataattttttagcaggtttaaagtcccttgagaattttgtttggatacaaaacacggtcatttgaaaaattccaaagtattttagtaaggcatttcattactcaaaataaagaattcaaaattccatcacgcgcctcattcttcttttgatacatgcttcatctcatgttgcagcttctaattcaccttcataaccctaggagttgagcactgaatttttatcttctcgccaagaagtaaaatagtattttacaatacggatttgactgcatttttgtttttctctttactcttaatttctttttcctttttgtaatctttgtttgatagctgttataatcttggtttaagcttgatccataccatcgttgatcagctctctatgccatcatctatcattcccacttgtcaaatggtcgtgaccatgactacgagatcaaataattctggaataagttttgtatgttttataatagctgttttcctgtgatgacgattcatggatacttaaatatgcttgatagttgatttgaggagtccaatatggtagtgatgatgattcatggatacaacccaagccttcaatttgcatttaggttatctcattttctgatagtttagcctccgcgatccttccattttcccctctatttgctcctgctcctactctttgatttcattgttttgctttgttgcagagactatccagatttgtgtccttgcaagccagtggttatttctccaaaagaagtctcggtaatttactctcaaagaaattgtcacccggtgattatctctttctgcatagtactcttcttattagtacctcaggtggtgatctttacatgtattcaaaattacatttcttatcatattctcaagcctaaacagtggcaaacctgggttaaaggagggaggatttttttttatcggtaaatgttaactattaatttgttagtaggaagaacaaacccaagaccttttcatcatttttaactattcaaccaaccttatatctcttaaaggagggagggttgtgataaaccctgcaggtaacacaacatattaagacataggacaattgcatttgtaagatgaagaacaaggaatgacaggaaggtatcatgtggtcgatgttacttctattctattgttccatcctctgttttttctttttgctacaatcaagcagaccattgttaaatactgcgtgtaattgataaagattttgataccaagataatgttccacccttcatctatagctgcaaaatttgtatgctacatgtgaatccggaagaaactcgtttagttttcattatctacaatgaaaatgatggtcttgaatgggagactcattttttctctacatgattgtggcagccaaagaagatagttctcatgagattaagggtttttgagtaagtttttctaaaaatacttctaaaaaaagaatttaagaagaaaaaaaatgaacttttctataagttaaatgagttctacattaactaattttgtaatcattctctcatctttttgaagagtataaaagatcttttacaaattaactaacaaaaaaactcattttaatttgttgaaaaactcattttttttttcttattttttctcttagatgtactattaaaaaaaatgcatccaaacaagtcctaacaacgtcaaggaaggtaactaaccgaataccaaacgtacaatccaaatcatgcgtttcaattcacattcaatcaggcgaaatatgttgaaacacccaacacaattctatgtttgaatcttcgttgatggtgaccaaatactaaattattatgtgaattgagacatacgcgtttgaattcaaggacaatcagccaaaattatcggggtcaatgacaaatatttaaattccttttaaaatcagttttaaccaaaacaattataagttcaaacactagttccgcgagagtctaaaaatcgctgtaagaaaagaagataaaaatggctaaagggtaatcataaaatgaagattatgcgctgcctgcaatttagggtttatctccttaaagcccgcactactaaccctagacacaggcaacacagcaaattcagaaacagcgttgacctcagaatcgaccaaaaataaaaagcgagatgcgtgtatgtatgtaaattagcgacaaagatcacacaaaaataaaaagctcttacagtagtgggaaggtagacggtaacctaaaacattacacaccaaacaacaacctttgctcgattggatcccacgtttgctttttattaaccctatccccaaagtggtgcaattggattgttcttcaagagtcctttgaggaaggcgcgtcttgatcggtggacttggcggcggtggcggtggtggtgggaggaggaggagggttgcgaccgaaacgcgtgacgaagatgttgatgaggctgtagaagtggtagaatagttgcgcactcaccagtactatcaggcacaaaacgacaaaatccattttgaaacgccaagaagacgaaagcaccaaagaggaaggtgaggggaagcagcagcagcaccaagaagcttttgaaattggggaaagacttaaagtgcagttttatgtcatgtatttgaagagacaaataacgtgattaaataatcaaattcttttatcaaggtatgaggtggggataaattagtccttctcatagataaaattttaaatttaaagtttgataattagtcgtataaataatttaatttaatgataaattaatttttaaaattttgaaatttaatattaaattgattctagaaaatataatttattatcaaattagttattaaaaattataatttaatgataaaataatctcataaatttaacaaaataattaatttattgtacatttttttaacattaaaagattaaatgtgtatttttcatcttcaaaatctaatttatcacatcattacactattaaaaatgaatttaactatttatttaaataacattaaagaaaaagtttataatcttttttgagatgtcttttacactctaaattaataaaaaataataataaattttagtcatttaatttttcatcctcttattattaggttgagtcatatttacttccaccatcacgggccaatatattattagcctcccttttatccatgcaattgttgacttttagtttctgcaccttcctttttgcttcctacacctcctaaaacacccaaaggtcccacacagacaaaactatccaccccttcatccaacaccaccactccatgcaaataccacacctaacaccattgtcgacaactatgtgagggaaaatggcgcatacggagaaaaagaaggtaaaggtgtgaaatgtgcctcaattccaaaatcatgaatccacaacacaataattttttatccttttagaacataattttcaaaaaggataccaaatgcttctggagtctttctaaaaaggttaatccataatataaaattacatttcaaattagggtgcaggaaataagtctaaaggagtaaaaagcaatttccttttatctaagggtaaaatatatttgtggagcctgctgcaggcaataaagaatatagaaccatcgggagaatggttaatgtaacccaacattgtatgggattcaactttccatccaattatttgtgtagaatttccttaaaatgaggacatttgtatgttttattccaaaaataaaacaaactcttacgatttttaatgattgtgactccattccttttactatttttatttctttattttttgtatttcatgttaccatagaatttggcattgaagaggctaaaaaaaccttaagagtatggtctaaagtgtatctctatagaactttggaagtgtatgggacaacaagcttttcagttggctcatccatccataatgtttgttgttgttgtcgtcgtctaggttgatatttcagaatgatcattttacctatgtaaccaacaagattggtcttggattggcatacaatagcagtttatcttacaagttaaataacttgttgagttgaatttaatagtcaagtttgcacttgtttctttgaggtgatttcctttctttggtgaaagtccttacaatctaattgttctaattcttgtttcactgttggatgtgtttattttagcattgacctcttcttttttaagcggggttggttaggtagatggaaaccgatgtccatgattttgtccaggcaagactatagtcatacttaatgttatttgatttatccaaattcttcatggagatatagtattctttttggaatataaacattttccagacttcatgatgcttaattttggcctaaactatttgtcgtgtaatatgaaatttttgagagtatatgatatgaatcaatacgggggttcattgtttttttttactaatcgtccttaaaaagacttttcgttataacaaaggaaagatgctcttgaaaagaaaatgtgcaagctttatgtataatgtagcgcaagagaatgtattgtgcaaagatgaggttaaaacaagcaaagcgtgcaacttaataagaacttaacgtcatagacaaggtgcacgccaagtgtttgatgaagcgaaacaaagataaagataatatgaggaagagtgcaacacaaaaataatgagtttaacaagaacaaaatgttaaaactaaaataaagcagaccacataagtgaacctaacaccacactttagtccaaaacctctaggcccaggtttaggggtcttatcctcacttatatggttctcaaccttcctattcctactcgatgtaaaacttcacgtcacacttatactccaacaagctaccctccaagtgtgagtctctttcacatggtagcctccccttcgagtggtagtcattttcaacccacgagtatcccatggtggccgcaatgcctgtgggatccgctgcctggcctccatgcatggactcccccactaggaagactttcgatacaagtgattcgcatgtccatggatctcatcactgccattttactcgtctaagtcgatcaccaactcaaatcatcgactctgataccaattgttaggcaactgagggggtaaacattggagagatttttaccaattattttggaaattcgatggggtaaatagcgaggagatttacaccaatggatcacaaggaaccaactttagtgaatttgacactacactttaacccaaaaccttaaggctctgatctacgggtgttatcctcacttctatggtactcaacctttccattcctacccgatgtgggacttcacctcacacttatattccaacaatcttcccctcaagtgcgagtctcttccacatgatagtattcccttgagcataagtctttttcaatccataagtatcctatggtgacccttagagcttaaccatggttgtctcgacatgccttgtcattgccaccaacatgctcaagtatcttgcatcttgcaccatcgcgctcttcaccgagccatggtggcaagacatgctacatggtctccatgcttgaactcacccgccaataagactttcgatacaagtattccatgagtccatagattccgctaactccattatactagtctgagtcaatcaccaatgagtccatagattccgctaactccattttttgtttttttttgtgatttcatccttgataaaactatatggactaactaagtccatataagttcacatgtaaatgaagtcaaattagattgatccgtgaaataaattgttatgcatatttcaaaaaaacttagtattgattaaattaaatgttgtaattgttaaagatgaccaaaacttaccatatgggccatagattatgagttaagcaaaaaaactaaattcaatttaaacttaaaataaggtcaagtctaagcaattcaagggttttacaagagaaattcatatgggtataattgatttaggttataaaaaacaaaaaattatgtacctcattgtcaagaggttcctaattatctgaaaataagaagaatatatattatacataaccttatccttacatatataaaaaaaaaattgaattcgaattcatgatcaataaattaccaaaatacaactttatctttgtgtcagtaggctctcaactaaaacaatttgaatagtttgaatttaattcaaactcacaatataacacactaatcttctatttaataattttaaaaaagtttatattattaatttattgaacagtcacttaggagagtcttaattaatgattaagttgttttcttctccacgatgaaacttatcttctatcatcccagtgattggccttcaactcattttatcacttttagttgttgtaaaacaattattataagatggatggcctttttttttatataaaaaatagtttttttataatgtattttttacattagtcgagaaaacaagaaaaataatgaaaagagaaaataaagtctgcaatagtaagcatataatgacaaaattttatcaagaaacataaaaaaattatcaacatttgatcgggagatacgtgtctgagttatgaaatgttagggtaaaagttattatatgaaatactagctaacatatgctaagtactcgatcattttaaaatataaaaatatgtttgaattgttctactatatactttcgttattttgatgagttccaagaataaatatttcattattattttaatgaaaatcttttattctttaaattttccagcaatttgtgcaagacaattttttcgtactatatgacagttcttaaggggggcaaaaaaaacccgtgttttacatttacttgtgtgctatgatttcttctttgtttcctttttactgaatgcagtagcaatcttccatcctaaatgtgtttgcattacttctttttccttttcatttgatatttttagtccaaaaaatagaaaataaactaatcactttgctctctcttgaattgatgcaacattaaccttctcacaaactgatgaaaatcattatcaaggttgggacagaaatttgccaatacttattacatgatggtgtaagtgagccaagtctcacataggtttcgatggatccaaactcatttagtataataaaatatgattttgatttttaataaatattcctattttatatttgttttttataattttttaattaattttttaataaaataataattttattttttattattgacacttttatttaatctttgataaattaacgaattttgtatttatttcttgattaaaaaaacatttgttattagtcttttttaaagggattaataacaaataaaatttcatttatcataaaacaaacataaaatttacaaatttattagggacaaaaaaagtgtcaaaaatcaaaaataaaatttttattttatcgagaaacaaaattaaagaaaaaattattaaataacaaatataaaagttggatatttattaggaatcacatacatgaaatgttattttagaaaaaaaattaaaatagtgattggacagcttaatcaaaagaataaatatagacaaaacagatgaggaattttctaacaagaatttgcagctaaatgcaacattttagaacaagacattattctcatcatcaagtcatagataggaactcaaggttttctggtccccaatgaaaataaaaacaaaagggtggctctctcagactcagcaacaaaccaataaaatgggattatccttccttccttatctgttttctatagcataacaaccacagaaatgaacctctctgacgtttacccctaaacaatacacaaatgattcactctttgtcaccgtcattaatccattgttgaaccaacttggtcactcatcttatgcacaataggatgaagaacctgcagctgaagtttagtgtctttcaggagattggtgtgtggggtgagagagacctttcttaagcttaagtttgagtattcagcgtaagaaatgaaaaggggcatgcaaaaactgaagggttaaactaagatggttacatgctattcccatctttctagtgctcctctttcaccccttccaatctcaattcatagttttcaaaacactaatcagtaccactcccccactttgaaattcactcaattccaaccaaaaccaaatgtgcctcacatccaacaagaacttcacatcaacctcaatgaaacacaacaactccatggccacttcatcaaaacaagttccaattgcagttatcaagtccctcttacagcacttgaatcctattctagcaatgcagcaattcatagcttcctaataacatcttacatcaagaacaactgccctgcagatgcggcaaaaatctacacctatatgcgtgggacaggcactgaagtggacaattttatcataccatctgttcttaaagcatgttgtcttataccttcatttctactaggacaagaggtgcatggttttgtggtgaaaaatggatttcatggggatgtttttgtatgtaatgctttaatcatgatgtacagtgaggttggaagcttggcgtcggcacgctcattatttgataagattgagaacaaggatgttgtttcttggagcactatgattaggagctatgataggagtgggttgcttgatgaagcattggaccttttgagagatatgcatgttatgagagtgaagccaagtgaaattgcaatgctaagcatcacacatgtcttggcagaacttgctgatttgaaattggggaaagccatgcatgcttatgtaatgagaaatgggaagtgtggaaaattaggagttcctctatgtactgctttgattgatatgtatgttaaatgtgaaaatttagcttatgcaagaagggtttttgatggcttgtctaaggctagtatcatttcttggactgctatgattgcagcctatattcattgcaataatttgaatgaaggtgtgagattgtttgtcaaaatgctaggagaaggtatgtttccaaatgaaattacgatgcttagtttggtcaaagaatgtggcacagcaggcgctctagaattaggcaagttgttacatgctttcacattaagaaatgggtttacctcgtctttggttctggccactgcttttattgatatgtatggcaaatgtggtgatgttaaaagtgcaagatctgtttttgatagcttcaagagcaaagatttaatgatgtggagtgccatgatttcatcttatgcacaaaacaattgcatagatgaggcttttgatatctttgttaacatgactggttgtggaataaggccaaatgagagaaccatggttagcctccttatgatatgtgcaaaagctggatcacttgaaatgggtaagtggatccattcttacatagacaagcaaggaattaaagaagatatgattcttaaaacatctttcgtggacatgtatgccaactgtggagacatagatacagctcatagattgtttgctgaggccacagaccgagacatttcaatgtggaatgccatgatatctggttttgcaatgcatggtcgtggtgaggcagcattagaactctttgaagaaatgaaagcactaggtgttacccctaatgacatcacattcattggagctcttcatgcttgtagtcactcaggattgttgcaagaaggaaagaggctgtttcacaaaatggttcatgaatttgggtttgtcccaaaagttgagcactatggttgtatggtggatcttcttggtagagcaggattgcttgatgaagcacatgaactaattaaaagcatgccaatgaggccaaacatggctgtatttggatcccttcttgctgcatgcaagcttcacaaaaatatcaaacttggggaatgggcagcaaaacagtttctatcattggaaccacataaaagtgggtacaatgttctaatgtctaacatatatgcatcagcaaatagatggggtgatgttgcatatataaggagagctatgaaagatgaggggatcgttaaagaaccgggtgttagctccattgaagtgaatggatcacttcatgaattcataatgggagatagggaacacccagatgctaaaaaagtttatgaaatgattgatgagatgagagaaaaactagaagatgctggatacaccccagatgtatcttgtgttctgcataacatagacaaggaaaagaaagaaagtgcgctcaactatcatagtgaaaaactggcaatggcctatggactgattagcacagctcctggtgttccaattagaatcgtgaagaatcttagagtttgtgatgattgtcacaatgcaaccaagttactgtccaagatttatgggagggagatcatagtgagggaccgcaatcgttttcatcactttaaagaaggatcttgttcttgttgtgattattggtaagaaaaactatacaaacagaagagtgttgtagacttgagttttcaaaacttgcaataggcagcatggaattgttcaaacatcacagataatgcagttgaagcattctaagagaggtggtcaaccatatatcttgtccacctacattgtagttcttgaccaaaaaattattaccaatgtaacataaccttatagtaaaatgataaaatgaagacttggtactttgcctagtctggcgtcatccaaaggggataaatcttcagatcttggccaggtacttttcttcaacctttgcagtgtgcactttgtgatatgcataattacttctttttttgtgtgtggtaatatgatttatttattgcgcttataattacaggaaaaggatctaagaatcgcttggcaatacaaatagtactttggtgagcctcagctaaatctgaacactaataatggtaagtttgtctatactcttctttccattgtttgttcttcaattatcattgtgttattgttacttcatttgtggtgctagttttttttccttcttgtgacaagtaagcaatacgtgcctatctaagtatcactatgaaccatttattatacgtcaatttgcattgtagttattttaattatgtgttgaattgaaattatgtggttttaggtataggagagaagagagactttatataatattatattatgtaatgaaatttattagggtgtagtgatatattttcataaaacctagaaacctagattactaaccgttatttatactaattataatcctaactaattaaaaaaagtcatgaggagataataaaatatgatgaaaaaatcctaagagataatgaggactaaaggaaactaattctaaactgaacaatggaaataatataggacaagcatttgtgatcaatttttatgatgtcctatggaaatggaacatttgcatattagtgaatatgccaaatcatgtagtatattacattgcaggtggtcagcatgattaatgtaatgattttgacttgagaaagcccctagatcggcatttttttagtggcaataatgtagattgtgttagcatcaaagattctcctaaccttaccgctcttcaagatcgttgtgctggatttctagctaaattctcaaggtgcggtgatctataacactattttggaaatgtattcttagatacataagatgattcctaggcatccatcttatagataccgattttaggataacaatatttaactgtttattcatattgccacacttggttgagtcaagtttttctgagtagaataaaatagaatgagattaaataggacaaggtttgttatttggatttaatcataggtgtataatgctctttctaaacaaaatttaactaaatctgttataaatgtttttttagcatgtgcaatttaagatttgatttttaatagaatacgttggtgtcatttgacccatccagtgggaaggggctttaattgttgttcttgggtgcaatttaggatttaaagcattctgctctatttatgagtacttatgttttgctctgtttggtacttcattgttatgattgatggtcttacataggtagctgtctggtagtattttttttttttttttaattggcactttgtgatcataaacacaatatagggtttatgcatttgggaagcaatcaccatttgcaaattttgcaattgtcacatttggctttgaaaaataattttttatcactatactagaaactcctccaatgttattcttttgactgctggagtaaaagggattcttagtattgcactattagtcattttgaactacatttgctgctgattctggacccttgcattagatacatgaacacattatcaatatatacaaggtatgcttgtatactctacctatcttcctttttgtgtcactcatacagtcatagcaccggcatttatgtccacacacataatatcttaagcaatagcttttagcattacttgcattattgccctttattaatttgtttgataactggtttccatattgtacgtgtgatagatctttcccctgcctttttgtaatgttaagcaaattggaaactttattggagtaacaatgcatttctagaagctacctttttctttcattctgacatttgattttcaacatgcaggttccagtgattctggacatcacaacattctcaataaaattacaaagacggacgtttttggttttagaatgtctaaatcaagcccttatggcacatctggtggttattctgggtcaactaaagccgggtcacttgatttttagactataccttatatataacagaatacttgtttcaaccaaaaatacaatagcaaaagtgagtcaggctcagtttttcttagtgcttgaaatttagccttctaaattgtgttactccttttctttttgttcttttgatgatcaacttgtttcaccattggttcgtctgcaatgtacatacattttctttaaaagttggtgtaagagtgagaatggcgagtgtcagggaaaaaaaataatgaaaataatgaatataaaaacactgttatcgattattgcttaattatgttgtcacttgaccttggtcatggcacacttgatacaagtgtaactacatgtttcttagtttcccattatgtttggcaaaaaatattgattactgtaacttcccctggagattcttgtctagttacacaaccatgggacccagaccactaaggacaatttaaaatgtatgggttagggttgtcatcccatggggaatgggtattttgtatccctgtcattaagttttcatataagatgcataagtatgatcagaggaggcggagtcacaagggggacaagtgtccacccttaaaatttgctgtaaaaatatcaaagtacccttctgaagcatggctcctctcaagaggggaagtgggtaagctctatcaagagccaaaaccttctctattacatcattcacatcttcctctgtaggattctgaagagcaattatagtttctattttggtattcaagcacttaaacaatctcgttgcatttcgctgttcctcgactagttgtgatggttggatcttgttcatcactactagtaaccctgtggcagcacaaaacaagagtgcccaccctttactgttcatcactactagtaactctgtggcagcacaaaacaagagtggagtatgataccctgattaatattatatctggtgcaacttcacgtgttggtcacactggatgattgtgcttatgcaagaattattatctgaaattttgtagatatgtatggacatgtttggataccaggtaagtgcttttgagatatttttattattgaaaatatagtgtatttttttagataagctttcaaaagctatcaaaatgacttttaatctatgtaatgtagctttaatttattcacaactcaggaagtttagctgtcacaaaaaccaactagaactcaacctttacatgctatgattttaattaatatttagaggcatcgatattttttttagaatgttgattaaatttaatactgatttagtttaattattaccatttaatatataaaataatactttccttaagttgcaaatttgggcttaacatacaaggcttaacatgttaaattaatactcaacaaaatttagttgatgaacaacctcttcacttgtttttcaaaatcgttagtggcagaatagcttatctgtatctttttaatcacaaaaactgaagtcgcaaaattgctaccactcaaaaaagtataccatgacactgcattgtaaaatttatatgaataattactatggcaatgtggttgcaagtatgtgaggaggtaaataaacttattgtttactagtgagattataagaagttccgaatacattccgagtcacaaaattgcagtgctctgatttcaaattcaaattgacaatagcataatccattatagcattttatagaaattcattcatacgctaagtaactcgagcctaattaaaatgcaaaatcactaagatggcaaagttcttccgatgctatttttttttttttttttcctttcaaaaaactcaactaaggtcttacttcagacgaactaagtttcttggcatttgaattatcaggtggtggcaaaaagaaggtacccattttaataatagcaagtctatataacaataacgttgaatagaaaaaccattttcatgttgagaaacaaaataaatccaattatccagtgatctccgagcaatatttgggcagatgaaggtaggataatttcagtcaaacatgtggggaagtggtctgatagccataaatgcatccaccatctgaaagaattatggagaaagagaacatgtaagttttgcaccatataatagagacaacaaacatatataactgcattctcatcttgttcccataaaacaaggttgaaaactctcttctacccaccaaaagaatgtttattttgagaaagccttgattgtcacattccactaacttttccccttcgatttaatgaaaataagagcacagaaaaaagtagagtgagttttttttttctccctctcatttccattataaaagagacaaacaacagagtttggtccttttgctagttcagacaatgattgtgtgtgtgtgtgttttttttttctccctctcatttccattataaaaacagagtttggtccttttactagttcagacaatgattttgtgtgtgtgttttttttttctccctctcatttccattataaaagagacaaacaacagagtttggtccttttgctagttcagacaatgaatgattgattgtttgtgtgtgtgtgtgtgtgtgtgtgtgtgtgtgtgtgtgtgtgggtgggtgggtgggtgggtgtgtaggtgtgggtgggtgggtgggtgtcatctagtgtgttagttttcagaacttgatgactagggcgagccctgacacagcggtaaagttgtgtctagttgacttgttggtcatgggttcgaactcggaaacagcctctttgcatatgcaagggtaaggctgcgtacaatatccctcccccttacctgcgcatagcatggaacttacgggcaatggggtacgtaatttatttattttttagtttttttttttcaaaacttgatgacatatggtcaatctgcacactaggtaattggtggaggcagatatttattcaacaaaacccatgtcaaagtaagccagtgtcagctgttctatcaatattcaacaatatgggctttcttaattccactcgatagactttcctctcacccaggttagtcattgcttttagcaatactttagatgatacaattaacaatagaaatgtcaacttaatttccccgtattattatttcattcttacagcagtcatctatgtcaacatttattagtgttgaatgcatacctcttcagtcacagaagcccgagctctgcgatgcctctccactagttcagtcaaaacttgaattagccgctgctttacctcaccagttagcatgcgcccttctccatattcctatgagagaatgacagaaaaaagaaatcaacacaagccttattatgctatttgtattaaaacaataatttgggggaatagatagaaatcagaccttctttatgtgttcaagttcatcatcatcttctagaaaaaaagtaaggtatttgactggtatatctacctgaatcatgttacaaaatgtcaagattctcgggctataactggaggtaaagactaaagagcaccaaagaaaaacaaagcaatttattggacaaaaatggaaaaatggaaggacttaaaattaatctttcatttttatttgattgggtatataaatgactgcttaatccttcttcattctatcaattcaggttttaggagaggaaaacattgagtgaatgttacatgttcacacatctgctacatgtaaactgtattatccatcaaaataaagcaataagaagttcattacctcaagatttgcccctaattgcctatgtttctctacagaatcttgcccaccagaaaatgcatgtttgtttacctgcagagagccgcacatacagttggtgaaaataaccaagtggaagtaggaaaaaacaagacagataacaagacagatgtagctcaaagaaacagagaaatgcatctttgtgacaggtgcaaaatattaccaacctggttttagaaaatgttctgttttcatttcttattttaacaaacaattacaaaaagaaaatcttgtttttattgtttcctgtttacaaatatttctacatttccattgtttcccatacaaatctttgaaaataaaattaaaaaagtgaaaacaagatggcacttcaaaattatttgtgcaagcaaaaaaacaaaaacagaaaataatattctcaaaccaaacagatcctaaattatccagtaatgtagaagcaatgtttacttaaggagatctagtatatagtaataagttggaataaataatttcaagaaaatgagaaaaaaagcctttcaatatcttgcttatacacatttcgtggaaactagtgtcaaccagtagatttaccatgtcacccaagattcctcaacaaaaagaagattctaccactgatttttgtcacaatgaacaaagtctacaagaattaaatgtaagcaacataataatacaaaaatctttgaagagagtaatttctttaacaaaccttgttctttatatcttttgcagaatcggtcacatatattgcagaattgggatcactagcagacatttttcctgtttccccctgcaaaaatttatattttaaagatgcgagataacagctacataagaatttatacctttttcagagaaaatttcaaagcctatatgtaacttcagtttccaaaaccaagatacatgaatgtctgttgactagagatcattgtgaccctttttatgtacttttcagcgatgatctcaacaaattaaccaatcatttactgcaaacagcactgttaaagacagtattactcatatttttttttttttgatcagcaaagataatatagtatatatatatatatgagtgaacatcatagtacaagtagtaccattacaaaaacacctaaagcccaaagcaaacctatggcagcctaatacatgaagaaacatggattaggatgccaaacctatgacagtattactcatatggtagttactttattctgttgtatcaaacttgtcctgagtcagctaggctgttactacagctgcctttaggtagttctgtagttaataagttacatagttgcacagttatttctgtccttaattatcagtctacaaatgtatatctgatctgtattgctaatcagttaattcatcacattcatttttcagtaataaaattctctcataatagtttttcattttaatttctatcatgatatgagcctctatgatcaagtggcagagtgttgccctcattcttctaataaaaagttaaattttaacacagtaggtaggtctgtgcattacgaatgcttcaagccaatctcccaaggtgatagaacaccaattgataacatgataaaatataatatagaacactggaatcacaacattacagcaatacacttgctgttccagagacaaaagtctcgtacagaccagtgttgttaaaattgcgatctacattgtgaaatcgcacgattttacggtcctaccggcgtcaagcgatctggatcgggggtgggatcattcgggagcaagatcggagtagaatcgcaagtatgatcgtgggattgtgggatctgcgatcccgaacgatccaagctcgacgaccaaatttaaaaccctaaaattttacctttgtttcgaaaaagctacgtgaccttgccttgccactgctgcgccgcgagcctgcgaccttgcccctctgctcgacctcccctgctgcgctgcgacgttgcccctctgcgcgacccagctgctgttcaacgacgacctcccctgctgtgcgagtgcgaccttctcccttgcaagctgcagccaccatcaaactttggcggagaagaagattagctgccgggaggagctgttggagaagtgcttgccaacgaagaagaacgtgacggccatgaagaggaagaagaatgcgatcttgaggaaatcatcttgacgaagaagaaaaacggcgcagcagaccagcagtgcgaagaggagaagaaaagaagctaggtttctctaatttgggcctaatttgctttctgtacccactttttttctttatgcagtttcatattacatttttgaaatggacttttgagttttaatttaggtagttgctatttatagtctttctatacccactttttttctttctacagtttcatattacagtatttattgattgagttttttatgcatatagattatatataggaattttaggtattgacgtaggatcttacgatccgagttatgatcctcgagttatgattttccatcccccctccagatcctaggaaaaatctcgattttaacaaccttgctacatagtgtattatttgtccacaaactacaaatctatgattaaaatagcggcgctttagcgtgctatcgcgcatcagtcgcgggttgcagcacccagccgctacttccgtgctgtaacgcaacggtttccgttagtggtcggtggtggcggtgcggttggcagctcttgcggcactatcgcgccactccatggaagagaagacgagttgcagagagcttcagctatcgggggcatttttttgaaaattaaaggtaatttaagggtaaaagggtaaaagcccagaataagtgaggggtagtctggactttgaccctaaagcgagacttcttttcaccctccctccctcatcattttcatgagtttctctttctccctccctctgtcattcccgtgcttttcctccctcttttcacgagcttcagcacctgcctccttcttctttcaaagagccactgaaaatttgtatttgactttacttgggtcctttgtgttcctagaatgttattaatctagttactttcaatgaattagtatgttgcttatttttgttccttgaatccttgttttgaatgtgtagcattatactcatttctcatttcctccaatttgggtgatttcttatcttatagcatttatatatgtggtataatttattataagtatttttatgaacttcacaatagcggctttactgctacccgctataccgctatagcgtttttggggtcggccgctgcccgctatttaaaactatgctacaaataacttcacactgcataattacacaacttaaaatcagatatatactcctaatacataactgccatcctacagattctaatgcataactaactaccagtagttactgtatacacataactgtaatacatgagtttttaatacagaacttatttctaaagcagttattttcttgaacgagtgggcatgtcaaagatataatataaaaccatttatgtgcagcatccaacagcttaagctttggtgaaagatggttcataatataagaaaataaattaaactaaagggaattaaaagtttaattagattagcataatgtaaaatattagttgatctctttaatcaatttgataaagtagcatggttttgcaacataaaaatacctgtaatgctgggaagaataatgattcaatcaaggctggcttgtggaaacccattttaggagcaacatcacgtgtcattctaaaatatggatcctgaatatgtcataaagaaaaactattactttttttttaatgcacatggatcctatatcacatgcaataccaagaataagaatgaatgctcgaataaaaaaaaatagaacatgatgttcacatgcattgagaaatgccaaatgcttttagttggaacaaatcctttttatggcatttctctttctttacatatctacgtatgaagagagtttggacataaatgatatcccaaaagcaaaggaagaaatttacagatatacacaataattagatctggccgttgccattgaagttaatcttcaaacaatatcaactagcacataaaagcattgaggaccaacggacctggtcaattgcacaaggaattaaacaacgaagattctcttttccagaaaataagtgaggaaatgaactaggaaatgatggaactgcctgcataaacaagtgaagcacatgcaatcaataccatgtaaaaatttcaaaatatgtattatagttaaattaataggactagaaaaaagcaacttatacaatgcattaaacacacatacatatacacacattctgtacacttggatccgttgacaatattttaaaaattaatttaatttccatcatcaaataacttgtaaaggacaaactttacaaactactttgaacaaaacatgcaaatggtgacagtgcgatagtgctgctattgcatgaaacattatgcattggcaaagaagagatagtgactaaggaaaccaactaactaaaataaccaaaaagtaaaggcaggaaccactatatgcagggaagaaatggaccatacctgcacaggtggaaaactaacttttccaatatgatcttccccagcaaaaccaaatatgccgacggcctggttataagtcacacgcttcccaacctcacacatgttcttgtagaaggaactggaaaggaaaattatcctcagaagacagaatatttgtttttttttataaattaaaaaagagagagtaaaacagtacaagagattgcgaaatttctcaagtgacattttatttcagaagtgaacagcaacaattgaacagaaaattttactcaacatgttcttttcatattattatgtgtaatagaaaccccaaattaattttaacagccactctggatttttaaatatgagaatgagacccagaaaaacatttaaggttgtggaacttgaaatttttatgggaaagagcatcatcttggaaaggaagtcagtacaacattctggatgaatcagagaactctttactgaatagagaaaagcatctgagactaagctaattttatgaatgtccaatttatagtattgtattaatacacattctctatagaattcctaaaactttaactaacctatgatttaacaaaatctccacatacaataggaaagcataatcgaaaatgtattatcagggaaaacctgcattcataactcacccgccaacataattgaaatcagagaagatgaacgtctttgaaatgtcaaaaccacaagcaataatgtcctttgcattctcccttgcaagtcttcggcactcgtctatagtaagatttttccagaagaacttctcatcatcagtgagctgtataaccaaaggaaccttaaacacatcttgcaaatacctacacaccatttccaccacatcaacaaacatccccagcaatcacaacaatttagaactcaccttcattttcaagcttgatccaaaacaaaagcatctaatttcaatcaattatcactgtataactctctgaacctatcatttatgaaaattactacatcagtacgaaaagcaaactactctgacacagaaattctaatagctattgcccacacagttgagatgacacactctttaaataataaacttgtaacttgataaataacataccagaattatgaatttccatcaaatttctatttaaaaaaggaaatggagtaaatatttacacctcagtcctagaaacaaatcactagtgtcagccaattcaaataaacagaaacttttggagaccaaagcaacgcatgtaacataccaaatactgaactcgctctttaaactcacttgtaattggaaagaaagaaaaaaaaacacgtagatttacaaattgtcatccatgcggtcgtagaaacaagtcaccactagtctcaccaatttgaacaaacagaaattagttgagagcaaagcaacacaagtaaaatatgaaattctgaactttctttaaaatttacttgtaattacaaaaaggcttgaatatgttattcatacttataatatgatccttttccagttttctacctaaaatattttttattttatttttcttcataattgtaatatactccttttcctttttcacttaaccaatgatgtggtactctattagtttgtcatgtcatcacttaaaggatcaagactaacaacaggtatcaaaagcaaaagtttgaagtagtaaaataaaaactatatagttttcaggaaataaactgaaaagggtatatattacaggtatgaaaaatatatttaagccatacaaaaataacacattagattcacaatttctcttcaaatttctattttaaaaaattgaaacagagtaaacctacacaattcagctctagaaacaactcactagctactgttaatcaattcagctaccaaaatgcgaactcgctcttcaaaatccactcatagtttacaaaaacaacacactagattcacaaattaaaagtcaaattccatttcaaaattcttcaaattaaaatcgaaaaacgcgaataactcactcacttggtgaacatgaagggaatcaagtgtcccaaatgcaaggcttcggaggaaggtccgcgtccggtgtacaagtagaacctatctcccctctcatacgcgtccagaatctccgcgaaatcgctgcgacacaaagaaacgacatcatcaaattgccgtttaagtaaataagggaaggagtgaaaggaggaaatggatggaggtaccggtgggcgaagaaaacgccgcgtcgtagaaagacgtggggagtgcgagaggtgatgcgctcgagacgcgaaattagggcttcgtcgagcttctggcaaccgaaacggtcgatgagtttgtcgtaatcgattttgcctttggcggaaacttcccatgggttaaccacttgttcttgttcctcttcttcttcttgcttcttcttctcgctctctgttgttgctgccattgctcttcttcttcttcttcttcttctctctctgaaatgttaatagaaacagagagagatgaaatgagagtggaagtgtggtgccttagtagggtttcgatcttaaaacctccgtttattatcctttcaacctgttttgtttattacctgtctttttttaatgactatttatgtgagttaattaaatttgttgtctctcaatttttttgaaatataatttttagtctgcaaaaagatttgttcattttcagtgtcttgtctatttttattgttcaaaattaatttttattttgtccaattttagtctcttgtatattttatatttggagatcaattttgaacaataaaaattaatgaaagattaaaaatggataaaaatgttaaagggactataatgctgatggaaaatcaaaggagaactaaagttataaaaaaattaaggactaaaaattaaaatttaaaaaaattgatagattaaaaaattaattgatttttattttattattaattgtccttacatgatttgtattattttgaaatattagagagaaaaaattatctaaaataaatttacattgtgttatgtaattataaatcttatgtttgaaaagtttattaatttttataataattatttaaaatttatatcaataataatttatgattgaatagcgtaaaatttttgtttttaatcaaatgtgttattttacaatgcacaaaaatcaatattttagtttctacattaaaagagtcgaaattttataaatataattatataatataaaacttaaaattatttttattataattaatttgtatatatatatatattaaatgacctcaataaagttttttaaaaaaatatgcagaagaaatcattaaatatatttacttactaacttttgtcgacatattagatcaaaataattaaaattgaataataattatttgttttaatatttttcaagacataatgaatatcatcaagattatgaaatgtattacaataaattaagagataaaaaaggacaaaacaaagacaaatttcatatacttattcttgtacaataccctttcaatttaaaattaaaatgttttttttataacaaacctcaccaagaacaatgtaacagaaatatattgtattaaaaaaacattgttgctgttgaaactttaaattaagtacaaagacaaagacaaattttgaacaacagaagttttactctcccgttaattcactgtaggtttctggttacttgctctgatttagattcttttattatagagggctaatatgcatcttttgttcatgtatatatttcatgatgatgatgattataatattttatggttttggattaactataatcatattgataacaatgatgtatgtttctgaccaatgtatgatatatgaatgcacaatgtatgcaaagtgatattttaagattaaactataagagtttaatacatggcaaattttttaattaattatgtgatcaaatttcaatcaagttaaaaaaaatcttaagttttaaataattgtttttttaataaaattatttaattaacaaaaattcttattaagtattgtatataagggtcaatgtgattaggtggcatcaatcataaatacagtagccacaattatttctttggaatatgagactaatgagagtatctatgaaagttaaataagttaattttttttttatattcttattttgtgttatatagaagtttaaccaaattcacgtcaaaaagaagtttatccaaatacaattttaacttttaatcaattaaaaaatgtgtggaaatcacattgtatttaaaagcatcattaataaaatatttaattataaatttagtctctcaaattcaaaaaaaaattatttttagtctctcctctcaaataaaaagaattgtattttttagtctagaactagtggcaaagtaataatccctccatctcaaattattgttaaggtaagacacgtcttaacttaagaaaattactaattacacaaattctttgactaaaatacccttattaaaacacttagggtgtaacacaacaataaacaatggtattgtgaacaattaatcctttattgatattctaaagtgacatatttttccacaaatcaaaactcccaaatagataatttgaggagggaataataaataaccttatcatgatacatgtacaaatgaagtcaaatataattaagacatttagaaaaaagcaaatagtgatgatcgagagcacagtgatctccaaacctatcactattgctggaccttgagtactgggaaggggataacatctcgaatgctgggagaatttgtcaaaagcatcaccagcctatcaattccaagtccctggaaataacatctttgtaaatagcattttaaaagctacaacaggaaacaaaaacaatttgatatattccaagactttatgggacaaagaatgcaacaaattaacattacaacacagaaaagtgaaaacattaattacatagaccatgttatattgattaagatacttactatatcactcatacaaatgcattaaaattccagtaatacttcataaaattcatatatctagtacatatgctcttgaataagaaatacaataaacagttgaaacataaatttaaagataaaaagtaaacatgacatacacacaatgaaaatcacaattaaccttacatcactctgtatttatcttaaaatgaacttaaatgattatgatataaatcaaacatgactattcttttaaaaaatgacactatctggaatttgatctgttatcaagttgatttcaagacgagaattgttgattgcattggacataatctgtgccttcaattgatgacaatgttaataccaaaaaaaaaaaaaaaaaaacattcattctcatgtagggcaatcccacaactatataaagacatgcataccattccagaagctggaggcattccgtattccaaagcggtgagaaaatcatcatcaagagtcacttcatatgagtcatcatcatcttccgttccttcctttctatcatcatttgttgaaacagctgctctcttcttttcatgctgcctaatttgatcttctaagcgtcctctctgtcaagttcaaaagatgcaaccattttatttaccatcaaagcactcaatcttccatagttaactttgagacagtttagttgtccacaaataatcattagctttcattctttttccaaatgagttggcaagaacaaagttcattgtctatttctagcagtattttgaaaaaattaacaaaaagaaatactcaaatcttctgcatatattagaataagtgccagtttgattataacgcagcaccaagtttgtcttgtttttgtttggaagttgcacatcgtccacctcaactctcagggtacaccttatatatctattgggcaacttcacttaatgttaattggtttttagctgaaatctaacatggtatccgagcctatagcccatcttggttaattgctattccggtgggcatgcctgttctggcagacattcgtggagggggtattgggaagtcccacattgcctgcctcaactctcaatatgcaactcatatatttgtttggcaacttccgttaatgtcaattggttttaagctgaaatctaacagttattcctgctgatatgataatgatgctcaatttgttatctgatggcatctatcttgttaagatgctattgccagataaaacaaaggaacaagataaataaactcctctgagctaacaaaccacaagaacctaaacctacttcaaaacttacagagtatagtattttatattcatcttcacaggatcttattttccccttttcccaagttgtttatgatgagaaacagttgactacaaacacattatatatagtgtacggtcagtaaaatctgcacaagctatgcaactaggatatgaaaagtttgaaaagtttggaatcttacctgatctataggatcagtcaattcagagaatgcattgcccaactcacgaccacaaatgaaaagttcaaatctctcagtcaaacctgtggatctaatggaggatcatgtgtaagatagaagataatatctagaaacagaatgtgcatcccttcttattgaggttggttttgatgtcttttttacaaataaatttttttcactacatgccataaattacaaagtaaaacatgagtataaaaaattctattataaatattagctaccagaagaaaggaggaaaaaaaacagctactcttaaaacttcaatgaaaatcataaaatcataaaccccagaaagtcctaattgagtttatcttttctcatatgcataacctttgaaatattgatgtcaacataatgatggaacaagggagtgcttcaagggcagcagaaagatcatgggagcatttcaactgccattaaaactagattataatgacaatacaagaatagtgggtgatgattcctgaatggatttgataatttgattgctgtgatgatgaaaaagaaaaatcccatagatgataacacatattaacttcattaagtcgtagaaagtaataaaagaatgttatatataccctttatggatcctaagttcaaatagattaatatttcatagtagactggataaaaataccttttaaaaacagcaataacattatttgatattttctgaaatgtttctaccttctgtgtggtttggccagtggagatatctcaattggatagtctaaaacaaatgtaggttggatgagctttggttctacaaaattctcaaaaacctaaataaacaaaacaaaaataatctgattagtgtgtgcacgtcaaattgactatataataaatgcaaaaagtgcaatcagaaaggaatatcaatatatcgatcatcacctaaaaagtgtaagtgtaattaattgcaaagatgactaacgttatcaaatgaaaagaataaaactggatgctcatatgacaggaagaaaaaatggggaagcaaatcaacctcattaaggaggtgaccaacggattggcatgcttcaatggaacctttatccttgttatcaagattctttccaagggtatccagagtaactcgctttgcaacctcaagatcatttgccaattcattgaaatcgatcccagcagtttctttaacaagattgtgcatagtctccctcctccagggcttttccagacatatctcgactccctgtatggaatcattacacctctttcaacaaatttgttataaagaaagaaatttcaaaaagaaatgtcatcagtcatcactgatcaaacagcagtgcaagagaactgaggagtgcaagcaaaataattataaaaataagttcataaaattaaagcaaaaataatacaatgaggagtggtataggaaaattttaacattaaagaccatattgaggttcactgaaagccagtaaccagttcacttatggggaaaaggctttggagacactgaataaataaaacaagattgagaacttatttacctttttgataaaattattaaaaaaacattttttaaagaaaaaatcaatatggttttgatgatataaaccatacatttgaatttttaataaaattatttactcatattatattgttaaaaagaaaacataataaaccattataaattttgatgatattgcaaattattttaataacattttttgttaaatttgattaagggattttcaattatgtgcctataggcacaagaaaagaaattaaaaatagaaagcttttattgcaaagggaagtatttataacatcaaaaaacacaaattatttttttgaagtaatttaaagtatttacaaaggagtatttcatactatgtgcccagacagcccctttgtttatcaatatatttatccaaatttaataatcagaatcaagaatcctttttatgtcaaattaaacattaatatattaagctattactattataattataatatggtgggactcctagcccttctttctgctcaaagtcccaaatatttgcccccaaaaattgggggtcaaggatggaatagtatgacccttcctcattgaaaacatgcatcaacatcaacaacaagtcaacaactttaacccaagttaattggggtcggtggtagatgaacccaatgatagatcggaaaacattgaaccataaaaatagagtaacgtgttttatttcattctagtggcttaggcatcatttcctacacgagcaattcaattataggttatatttagtaagaacaacgtctacctgataatcaatggtaagcttcccatgaactgcaagagcacatcgagtaacgatctcctctgctaaattcatcatgctttggtaatccgagtatgcttcgtacatctaaagtataactaatatcaatatttaacaaaatgcaattcaagatataatgagaattatcatatgcaaattgaaatatcaagtaatcattgctaaaacaacaatcttgaaagcttaagctatgacaagatttgaggaaatattacatatgctcacatcaagtactaaaactaactatatattctcacggtacatttaaaacaacagctgctgtccatgtcaggacttgacaaagttttaagttggttgttaactaaccgacacaatcattttcttttatagttttatttgatcttgggactggtgatgtaaagattggcaacaaagcatgatatatagaatatcaatatccaatgaaaaataatgtgagaactaacagaaatggttattattatcaaagacaaattggagcagagctccttacaactatggaaacctcactgtaaacaaagaacgaaaattaaaaaagaaaaccaagactgtcatcatgctagtgcagtcctcctctataccaccaccaaattttccataccccttctctaccaccccctcaattcccagatctccttaccttaccctcttctcacatgccatttgtcccaattttgttatgacattctctctctatgctatccgaattttccacctcctgccctctttggttattctttctttttcctctcataaaccaacagctagttgttattgggcacaggttttcctcttctactatacacatgcactattggcctatcataatggaagctaaaaagttcacctcctaaatctaaactttaatttacctctatagttgtaaattcaggattatgtcgagttgaaattccttcatttctaaatattcgaccaatctcatatactttttcaaaaccacccacctgccataaagaaaaacattaagaaggttaacaacttcactaaatcaataaaactatgttatacatggaggctaatccctcagtatttccttcctgtgcaaaaagaataaaaataaataaaaaagaatgcttatgtaagctcttgtctgaacaaacaaataacaactaattcaaatctcaccagcattctcttaagatgtaattcagttgcaattctcagatataagtctcttccaagagaattatggtatgtaataaatggtctggcttctgctcccccagctgctccctagtcaatgaaattaatcaggttcagggaaaaaaaaacttccatgtataaatatcagacacctaatcatattaataaaatgacaacaaaagacgtttcagacagtaattacattatttacataatttatcacttagcagttgttattgagagtcaagactgagagcataaagatacaaaccatacacaaggactgaaattttaaaggtctagttactactttgacaaacttcatataattttattactatatttaaggcacagaatactcaaaataataataaaaaaaaaggagttaatgaattgcaacagaagcaagcatgagagcaacaagacataaaacaccattattccaacatgttgacaaaataaatttctaaaacaaatggctatcagatagataattagcaatagcgccaccatacttatcatcaaaggtttggtaattggaaatgattgataatgaaggattcaaataaattaagagacagacaaaactaaaacggagtgaattgggttgcacttataaccagaatagttttagctgtgtcaaaatcagtaaatcacagccaacaatgacatattaacaataagtctgacaagttccacaattccatttaactgagaccttataacccctatatcaatctgactttttaagagatacagtacaatgcataaatatgaaaataactaaacaaaaagatcacggctatcaagctgacctgttagatatcaaaattatttctgaaagatcaattctctttgcattttataaatattaaacaatatataatcaaacaactagcagagtacctaacaattctgaagatacattttttatgtaaaaaaaatgtgtagccagtgtaaatacattaaaatcagcaaacctgcaaaactggagtttcaacttcaacaaaacctaaagaatccattgtcctccgtatctctgatacaacctatttgaagggaactgattagaacataatacgaatagagttatttctcaggcaatacataagagtagtttgttaatctgtctgaaaggacagaaggtgaacccatgatccctataaccaaaattctaaatcttctttcaaatcaaatccattaaactatttaattaaaaaggaaaaaaaaatgaaatagtagcgttaaacttacagtaacaagaattcaagaaaaataaatgttaacttataagataacgtatcaccaccccaaagcctagacaaaatgagaaccattatttttaccaaagtagttttaccacaattctacaccaaacaacatgatgactatcatttttttgcattctagtctagtttattttggaggagaaattcatgaaaagtgctagacattctttagctgaacataaaacacacttcccatataattcaaagtgcaattgtaacctatttcttattgttattccactgagtccaattcctagacacctttcacctttatttaagaattgcagttttgtcccttaatatcctccaatgaatttatagaacaaattgttcagtttgatatgttccttattcgacttctctagaaaagaacaatactagacagaaaagaggcatagcacagtaggtgagaataagatatctcaattaactcaataaagaaaatggaaatagaaaatagttataactcaataaagagaaatgggaacagaaaacaagtagataaaatgaacttttatgactctacaatgttataatatttaaatattaaactaaaacaattgaataacattggttttaaactcttaaaaagaaataaaaaatttggaagatgaaccacctttgctcttctacggaatacatctgctacctctggatttgcaatcatatctacatacctaatcacaaatccacaagaaacagtgaataagaaacattttaactcagatcaaaccaattcagtccaaaagtgtaagggttaattagaaatgacatggaacaaagaagtaataagaaataacagcacaaaaataaataaaatgactaagatataagttatacttcataaaataagaaacaaataaaaactaaaatccattaaaaaaatttaagatgaagatatttattagtgatgagaaaaaatgaagaacacaagactagatgtacatatcctcttacaaaaatagaataaaatagaaaaggaaaaaaaaaaaaaaactagtatagaagaattgtagtcatattcactaataaaataccaaatgcattagtatatatataacagtgatttcaattagtgaggaacagacacaaaaatattaaagcaagagcttacctctgacgataacgtttatctatatcagttagtccatgatatttgtcaggcagtggaagcagagattttgtaaggattgcaaaagatagaacagacacagaaagttctcctgaagtgagaccagaaaaaacatgagatggtggtcaactttttcataactaacaggctatcagctggcctttgtcaaagggcatatttgtcccagcagagaaaggatattcatctcaaaaggtgttaactatttgataatcagtttgccattatcataactagttcccagtcactaacttgaaaaaataattaaaggtatggcatatactagaaacctgcggtagatagacattaataagacaaaagaaaaccatatatgaaatcaaagatggctgagctaactctagttgaatataataaggcaactatcagcaaatcttttcaaacattatttgcttttttttttttttttttaatcggccaatgttagttgttaaatgttagtggagggattcaaacccacgacctctccctcccacccttccttcccctcttcacttttttcttaaccacccaaccaaccttatatctccacctagagacagcttgagacttccaatttgagtaaacatttttacattgtaaccttttacctatatagagaaatacttcttgaaaaataaccatgtccctgaactctcatatatatcacatcagtagcgaaatttcactatctcaattctcagctaatatattatcttaacaaggacatatgcatgtgaattcacaagcatacaagtcatagaattattgcaagcactgataaattatagttttgggctcaagatatagtatgttcaaatgaaagcaatatcaatttactaaatacctatttctagcctcaaaaagaacaaaagaaaattcatttaatatgccgattagataaatacctttttctgttcgttttattgttcctcttacacctaatatatcaccaatatcaacatgggcctttaactgttcaaactgctcacctatgagtctctccttatcacaatagagctgaaataatagattttaacaacttcagttagcagctctctgtagcatttacttgacataaaggagacaatttctaccttatctatgaataaaaaatgcaatttacaattaagactagaataagaacaaagaaacactgtaacatatcataaacttaacaaaagtccaacatgtttaatttacacaatgaaggctttttatttataatatgcttcacaactacaatgaacaatggtttccctaatttacataaatacatacagctcacaataactcataatatctccacttactatatttatatagtctctaacagttaccatgaatgtacaaaaagcaacaaaaagtgcaaaagaaaacctgaatcgtccctgaatcatctcttagagttagaaaggcaagctttccaaatgccctccttgcaacaattcttcccgcgacagatacgtggtcattctcactatttttttcctcaccatttcctagatttctgtatatatcttgcagctgattagtaccgtgagttttgtcccattcataagcatacggatcaagccccttgcttctcaattcttcaacctacaagcaaccagcaaaaagggatgtcaaaaataataatcctttatccataattgaagacagtctcaaaatgaagaccattaactttttagtcttctgagaagcactcaacgtctcagccaaaatctatcaaattgtccaaactatccataattgaagaaaggcacctaatcccaactcaaacaacagaaccagataacatatagcaaccatgcattcaattttccatcatatcccctagctaaaaaaaaaacgtagctaaatagagttaatcttaaactattcttttttctgaaaaacacacacacacgtgtaaaaaacaaaatgcatgaaattctcttccttttttcccccaaaatcaaattctcatattttaccagaacgtaaacaacccgagagaatagattaatatagagacaagttgataacaaaattaactacaactctacaaggcaatcaatattcaatcctacattgaagttcaacgaaaaaactcaacttcaaattcagcttcaactcatccctcaccacacaaacacacacacacgaaacacagtaattagaaggaaacggagaaaaacgtcaccgttgcaagtgacggaagaggcacgtaccttcttcaagcgaattgctcgaatggcgtccctatcagaagttgaagtggtagacgacgacgctgagctccggcggccgcgaccggcggccctggtgtcggaggcggcggtggaagaagagctggcgcgaagaacgagcatgcgaggtgttcgacgaaatgcgtgagagtgaaagaagtgcttcaacgggctccatgttagattgcacagttttagcgcttccattctctctttcaccactggggcgtaatatccgtttatttatctgtttggtttgggatagcacgcacgacattacaatttttaattttttttgccttgtcaatgctccaaaagaattttgtaaatgttgggaattgattattgaattatagtattttgtaattactgccttaactatttggattgcacggcattacagttttaacgactacaacatctaaataatagtattcttttttaaaaagttttgttaatatccgatttaaggatgattttaaataaataaaaaattatttaaaatatcttatgtactgaaaacaagtttaatttttatgtattataaatgtaaaaaaaaaaatcaaacaatcaaaattcttgactttttaatggacatcaaaagatcttgataagtatggtaattaaagtattactataaaaaaaattaacaaatctattatgtacgataatttataattagataacaatttaaaatattttataacctacgtatgaatttatggtatttttttttataattaaaaaacaaccagataaggatttatatataaggtatataagtttaccaagcaaggtatataatagttgatacataccatgcacttccaacataaacagtccatggttatgtcatatttcagcagcattcgagaccaaaatactatataaccaaggctatgtttgatcccatctatcataataaatgtacccaccaatcccatgcaagagtttagtatttacataagccccttggaaacatattttaccctcataagcaaagtacaggttgagaatacaattcaaaaaatgatatggaacatctctttcccaatactttaatccatttccaagatgtaagttttatggattccaacaagtgttccaattctgccttaccatccttgaaaacaatcgcattccacatctgcctaatcgtatttatatatccaaacaatccaccaattttgtctacgttttgaacctgagatcataacacaatgttgccaccaatgtaccgacggatctgcaggaagcatcattgaataaccaatccagttatatagacccatccaaactcgataagcaacccacgtgtgaataaagcatgaaaaggtgtttctacttctagatcacatactagacaaccaatgcctattgagccgtaacttatgttcctttgatttagatcggatcttgattgaatcctatctaggatgactttccaaacaaagctagatgctttggatgcaactctgatattccataaacacttcaaaacctcttaatccaggttccccgaggagccaggttggtgatgagctagtaggccatatatctctcgaaccaaatatgtttgttgggatccattcctcaaggaccatctatccacaacatagatgttgccagggaagagttggatcatagtaagtaacctatacaaaagatcatgttcccacacaaagggttccctcctccatctaaggttccaaacccaaacattcctttcaatgacccccacctcactaatccgcaattctttttggagagaaatagaatacagtcttggaaaaatattcctgaaagatctctcccctacccaacaatgttcccaaaactttcaagtctcaattacccaccaaactcatgatgttatttttaaaccatttatcctcctcttcccctagacacaaatacttcacattgcgccaccacaaggattgtagtctttggaattgtgtaatatccggttcaagagggtgtccatacttagaatagacgactctagcccacaaggaatcttgttttgtcaacaatctccaaccctattttcccacaagtgccttattgaacaaggctaaatctcttacccctagaccccttctttcttagatagacacactttagaccatttgacctaagaaattttcctctcctcaccatgaccccctacaaaaaattcctttgcaaataatttatcattttttcacgcagaggggaattttaagaaagggaaggaagaataagggtaaggaagagagtaccgacttaagaagacaaatgcgtccgccaaaggaaatgaatttagagctccatgaacaaagttttgctttcatcttctcaataattggataccaagtctctttcctccttaggtttgcccctactagaatccccaagaagttgaagggaatatccattatcttacaattcaagcaagccatcagtctacacaagacattttgctccacctacactcctccaagtttgcttttgaaaaaattaacttaaacacccgccacgacttcaaagcatctcaaatttgctttcaacgtgagaacattttttaaagttgatttccctacaaaaagagtatcgtccgcaaattggaggatggatattgaaaaattcctttctccaaagtggagacattcaaaaagttattgttttaccgcttatttcatcaagccaccaaggccctctaccaccatgataaagagaaaatgaggcggatccccttgacataaacctttttcacccttaaattcttctgttgggctcccattgactagaatcgacatagacgcggattccacacaacatttaatccactttatccacctatcattcaaattcattgtcttcataacataatacaagaaactccaccagactgtgtcataagccttctccaaatccaccttgaaaagcaaagttggcttcttcattcttttggccccatctacaattttgtttgctatcaccactcgatcaagtaaattttgtcctccaacaaaggttgattgttcttcatgtatgagtttgttgatgacttatttcaacctatctgccaacaccttggaaattatcttttataggcagcctacaagagatatatgttgatattgtccaatgttttggggttgtctacttttagaatcaatgctatgaaagatgaatttacctcacatgggatttttccattcgcatggaactcccttagagcacacactacatcatcttttagaaaccccccaaaacccttaatgaaatcaaaattataacagtccgggttatgactcttgttacgctcacaatcccacatcgcacacttgatttcatcttcaaagaaaggatgggcgagagatacgttatcctccacatcaacggatttgaagaagactccatccagcttgatatccacatcgtcattttctttgtatttttgctggaagaaagtctttatttcttatttgacctcttttagatcatccagccaagacctactcttctaaacccttttaacaccattttttcttttcctccacttcacggttaagtgaaaaaatttggtgttagaatcaccctcccatagccatttgcatcttgatctttggtgtagaagagattccatcttcatagacacctaccaatgctcctcccattaatgaattattctctttgtctcttgacttattactctactttgttcatcctttaaatcgaatacaactatattcttctgaatcttaaacattcttctttcaggttgtcaaatcttcctttgttccaaaccttatttctttcttcaaagctttcaacttttcttttaccttgtaaagccccaaaccttggacttggaaattctcatatgttgacttaacaaactcatgaaaaccattctcctagagccaaccattaatgaccttgaatagcttcggtcccccaatcttccaccttgtgtttcaagatgaggggacaatgatccgagaaagatcagtcaagaaaaaattataaataatatggccaaagatttaaccatcccttcaaaaggagaaatctgtttaatatactctagacgaattgtcgttcctataacaggtgaagctccttccaatcattggtatgtcaagaagttccatggaatcacaaaactcgttgaactcttccatctctcgcttttgtgaatgtgagacaccacttacacctactcgttcgtcctttttcctcactgcattaaaatcaattgctagtctttcttgtaaaatatcattccacaatactcttttcccagtattatcatacagagcatatacattcaccgctaccatattctaatatatctctttccatctccctatcagaccgaggtaccccaaaccagagaaaacatcaagcaacacaaaatctcgtttcttccagatgcacaataaaccacctgccatattgtttgcaggtaactcttcccactccatatcgttatcaccccaaatagtactgtatagacttgcctatatttccttaagtttgatttcttgcagcatcatcaaatcgattgcctcagacctcaacaagttcttaacatcttccacttaagcctacatcctgggtcgtgaacattacaggagagcacaatcatatatgtattaccttttcaccctgcatattagtcgcaccttgcttctccatatcctccttatctctatcttccaattccccaaaaatgttaacagtcttgatcactcaagaacattttttgacgccccattgcgcttacatagctcccagagtttaaacgattcagcttggtgtaacaccccgtgtgcacccagtgtgttaacatactataatatcagaatgacataaaataagtcgcggaagcatacaagaatcgtatttcttgatacattatgtatggttcaaaaacatgcacatatacaaaaatcataagttcaactatctatagcccttattgatccagataacaacacaaaatcaggcagatataaaccatatctatatagatatgacagaagacagaaaactacctcactcaggatggtgtgcatcacatggagccccaaagctcccagctctaatccaagcagtcttccatgcttgaatgcactggttttacaccaataaatctattttcgctgccctacgcacctgcaacataaatcccacaaggggtgagataaaactctcagtaagccagggttcttggagatctttcctccccctggtccactactaactgcctactataaaatatggcttattcatagccatctgcattctctcaccacagatcactcatactatgtattatgcacgcctaactggcctgtgcattcaccatctatacaggggaattccctgactaagataaataggctctctcaagctccatgagctttaaatctcaatctcatgacatatatatatcttggcattctcggcttacttatctcatatctagttcttgtgcatatatctacatatatatattcatcctatctataacacctcatcattgctgaggtaacattggtccaaggaataggttttctgtaacctagtccttcatctgggaataatcattaaatagggacaagatccccagaatcttactgtactcaaattagtacctgaggagaatcatccaattaagggctctccactcaactcagaactatcacataaatacacattgcctgaggaatctctcaactcaggactttcacacacaatgcctgaggaatctctcaactcaggactttcacacacaatgcctgaggaatctctcattgcctgaataggatcatccacctactcgtgggtacatctaatcaggacttgccgcccaatacctgaataggctcatccacctactcgtgggtacatctaatcagaatttacatggacgcctatggattttcctaagagagatcatccacctactcgtgggtacgttcccaaaggggtccatagtccactatcctctggccagagaatgcacatgtatatacacattcaagataaagcatgatattctcacaatatcaacacaacatcaatatcatagcatatcaatgccatgcataacaatcacataattagtataaagcatgaccctctcacagtgtcatcacaacatcaaaattataacatatcaatgctacgcttatcaatatcacaatgtgaatttatcatcaaacacagaacactgacatagtgttcatcaatcattataatagcatggatatttttcttatacccaaacacatttcatcctctatcctagtgttgagttaacactaattatcatattcatgtctaccatacccatctattagccagtatcattcctaacacattcacagtgttaggtgcatcatcaatcataaaacactagtacagtgttcatctcgtcatcatacaatactactaggaactcagaatactagcttagggttcatattctctatactgcagataattcaataagtagtgatcccaagcagggaaatcactccaaggaacactgagcttacctggtatagccgtgctttatcctcagcctttagctggttggttcaggttgctgacatcctcgtgtctcgctctctggcaaaccatatagcacagtcaatatcataatctcaataccaggtacctaacaacggtactcaaccatggaaatgaaaggagacatgattcctttctacaattccctcactcatctaacttagagttatcagcctattcacctcataggcccctcatggatcctcagaaggatcattctctgcctgatcacggccttagagtctttgtaaaactctatatccatcaatccaatggcccaattgttcataattcatcaaataccaaacatggccaaatcaaatatattaatacatattcaccgtttatttgtcctcatgatcgatccatatacattacagatgtttatttctagctcagaatcttctagtcactcattattcttcacactcatcccagtctcagggtcaaaaccaaacctcatcagaattccattttcaatatctcatattcctcagaacaacctcctgatcaaacttttctaaagaacctaagcctaattccagccttatcacaaaatagttactattcaccctattacccaaatcacaaataacccagtgaaaacttaagttcttacctcagaattgtagaggaaggcccaaggattgtcactccaagcctcagcatccatgggctgtcttctttcctcttctggactcagctttcctcaaggtttctcaaaggatggggttttctctcaaatcttggctggaattagctcacacaagatcctaatcatgttttagggtgattagaaggtgtttaggtgagttgtgatgaagttatgaagcttccccagcccatcaatggctgcctgagccagaggaagaagatgaatagtgtttttccttcctaaaacgcgaaatggccttttatactggtcctcactgacattgtcgcgctcctggcgccattctggcgctaatggcgccaaaatccagtgtatctggcgcccttggcgccactttggcgctcctggcgccaatttccaacatctgtggcgctcttggcgccactctggcgctcttggcgccaacttccagcacctgcggcgctccctggcgccactctggcgctcctggcgccagactccatcgctaaaattcgtcgttaattctgtcactaaggcttttgcgacagcttttatgacagaattttataaatttaaattcctatttctttttctcctttttaaaaaaaaaacccctaggttattatacttggtcatctctaagaattaagacacccttgcaattgtttggataaagaggaatggattgacaagaggtttgagcagctgacaagccaagatgagaaaaagaaaaagattttctaaacccttcagagacacatttatgctttctcctaattaagtcatgtttaccacatcccttcgaatgactttgttgtctcctaacaaagcttacacaagtggtatattcactttttttattctcccttgagacaattagaggattatgggcactcgagacgtcccatgtttgcacaccaaaagcttatgtttcttggggactttgtgaataaaacagttatacctggatttgaagctaatgaaactccttcttccagactttaatcccttttcaccatgaagccttttaatcttcctttttactgatgtggtttgttgctccttgcgttgactccattagactagggtcctttttcccaattgggccaccaagttagtttggatgtcaggctttttacaaacatcaactcttttggcatagcctgtataaaggtttcgtggcctaaatcatatagtgcctaccttgatgaacccttaacgtacataaatcctttgcccttattatatttaggctcaaattctctcaccccagtttggttgttttttatatccaaaagtccataaggaatattttcttgtacatatgctacctgcaactagctctcatccaccccttgagtttctcttacctccagcacgttacctagaaactccttcgaaacctccgtcgcaacgtatacattttttaaatctgatagcaaatctttttctttcagaatgtcatttggagctatcccatcccccacatctaaaccatgtgcttccttggtgaaaagattcctcgttccttccacctacttcctcaaagcatcccactttatccatactttctactgttttggcgacctttttttgtccatttttaatgctcctgacctgccatcaagtacccccttttgaacacagaaagaatttgtctggtggtcaatggacttctctttctcagtgttgatccgtgtcggagtaaattcttggtcatcattgtctttgtctgcccagctactccttccacttccccattccgacattacagatccttcaaacctgccatcatgcgattccataatgcagagtcctctgataacccctttccgccacaccttatacacccaaacagccctttccgccacaccttatacacccaaacagaggcgtactcgcaatacttcttcaatacacacagggagtatatggtcgttgatacgcattcactcaaagaaatgaacaaatttttcaatgggcaccaagatctaaaatctggcatactctaagttggagaagttttatgtttcttcaacacaagtgataaagctcccaaaagagcttgccaacttggtaaagcattcaatgttccataaatgtagaggtagtccaaaacaccttaccgagaatcttttgttccatagtcctccacttggtttccatggctctacagattcaaaccactcacccaaccattcttgttggtgttgtaccatatccccaatattgtagtttttctctcccgatagaagcacaaggttgtcacctaggtaccagattctcaccatgttgaaaccttgtacaataaaactctcctagaattgttttagcttaagtggattcaagattctttccaccagacaattctctagccacttcctgtttgtatcttgaattgttagagatcaccctctccattcaccattctctactctccattctaattagcatttttagctattccacatacgatgatgtctcagcttggatcccatctctggcttatgctccccacaccctgtgttcaatcttcctctgttttgtccttgcttagttgcttccaagttccgaccaaacctaggtaagttgaccctaagcttctcatgttcaaggaaaatatggtcaagctgatattccaagtgtttttcatctgatagcccttggaatctaacaaagccaaaaagtttgccttctttattcttctttgttgctatgaatacttccttaacatcaccccacctctaaaaaatcgttactaaatcttcagcccaatacttttccaggaaatgtgagaagtagaaagtagtgatctgagctctaatatttccttccttggttcaacctttgtccatccgccgtcctactcttctaccccacccctgatcctcatcggttgtccctcatactcagagtgtttcccttcccctctcataactaccaattttttcttaaaattaattctttgcttatataaatttaatgattggatattaaagtaatatatcatttaattttaaaataaaaaataaaaactcatttatctctcctctctcctcaatcttctctcatctaccacattagaaataagaaaagtgttagaagatcactctttaacataactcaaccaagaaaaaaaaatatttctttaacatactcctttgaacacactcatatatctttttaataaattttaactaattaaaaataaggtgttctaaggatcattaaaaaggatgtatttctaccatttctcttatatgtaataaaactttttatccaaatttttaatacatctaatacttacatttgatactatctattaaggtttttttattggtgaaatacatcaagaagaaaaactagaatcctctagccaaacaaacttgagctctgtcaggccttaaaacagaaagaataaactatgaagcaaaagcaaaaacatgataatcatctttatccccaagagcctgtttagttataccatatccgttggttgataagtttctctaaaaatatggttccacaaagtttcccccatattagagcaaactgcatgagtttcttgaactatattgtgacaaggatgaagcacacaatatagcattcagtttagcaacaagaacagaaacatcacctaaaaagatgtgaaagtgaaaccacaaataaagttgcttgcatgatcttgaagcaagccaccacaagctgcttaatttgctacccccttgcgaaacaactctaccaaagttttagcatcatttttcctaaatgcagccacctaatattcacaatatttgaatgaatcttatgtgtcttcatcaaaggctaatacatagaactcttaaaagcatattcccccaccaaactagtttattaataacttcttgaatagtccaatgctccccttggaaaattataattttccatctccatcataaaaaaaattaagaatgattccaaacaaggaatctactgcgcaccatgaactaaatgagagacaaattactcttgagccaatttttccaaacattcgtagaatagaaattaatatagtacagacaccgacacgcgacacgtgacacgacatgttgggacacgttttcatattaaataatatttttaatttatataatgtatatttcatttaatattcaataatttaacaaaaaaaatttaaactaaactaataatacatatcaacgtaccaaaaaaaattcaaagaggctgcacttcaatcttcaaaacagaatattcaattattcatagacaaacataaaatatcaatcaaatgaaaaaaatataaatttgaacctaaaaaactaaaaatataaatttgtttaaagagtaacatattaatggttttttaaagagtaaaaagcaaaacaatagacgcatttggggtttatttaccttgtttaatttttaaaaaaaaaaaactaaaaagaaaaaacctaacaatagacgctgagacgcatttgggggtttatttagaacggtgactgcctggtcagagtgagagagtgaacagcaaaacccatttaggggttctgtgggtgcaggcgcacagcggtcgagagatagacgcaaacgataggtttcgtggaagcatcacacaatagaagcaaactggcgagaggtcagagcaaagcaagaacacttacctgtgactggtgaggcacgaacgacgggccgacgacggtgagaacggcggtcgaagcgaacaactgtcggaagtagaagcgaacgacgcggtggtgagcgtgaagaagtgagaagtgagaaaccgtgaagggtgaagaagcaaagtcgcgaattggtgagttctgaaacttaatatctttaatttttttttctcacggaattgtcattgaccgtgtcggacacggtcaaattcgcgtgtcgaaaacggtcaacgtgtcgagtttgttgaccgcgtgtccgacaccgtattgacgtgtgtcgctatatcggacgcgattctctctgattttggacgtgtccgtgcttcatagatagaaagcattgttactccatgtacgaacgaaaaattgcaacaccaatttagagtccaaatagtccctaaacagatgaagaacatattcctcatgtttctcacaaattgcacacaagttatctacattcatccccatcatgttccttctaacattagtcaaaatgctttcatgactaactttccaaagaaatgcttttattttttcaggacctttccaattattcaccagcttaaacagaaaatgagcaaattaaattttttagactgaaatgtaattttcgtccagttattttttcaaatttataattttaatcctcctatttttttaattaagacatttcatcatttatttttaaaaagcttgtgattctaatcttccattttttaattaagacatttggtctcccacttttaagaaatttgcaatttcaatcgtttgtgtccaatttcaaatgttgactgacatgtgtttatttattatctacaagtcacatattttttaaaattatttaatttttagcaagcttaatttattaaaaaataattaaaagatacataatcaagtatgaaattgaaaaaagagagactaaaatcacatattttttaaaaagtgggagacaaaatgtcaattacaaaatagaggaactaaaattatggatttttaaaaattgacggacaaaatatcttaactaaaaaataaaaaaaaaaactaaaattgtagatttagaaaaataagaggaaaaaaattgcattttaaccaaatttctaatagtctcataggttgatttcatcggaaatgaatcatcactaaatttattccttttgacttccaccaccagaaggtaacatggatacaattttatttgtaatatgctcaagaatgtatttaatctttgaaactatctaacaaccaaaaaacccatttactccgagttctccaactctgcatctggtaaactattttcagccaaatccaagaaaactccacaatatctggtatccaattgtggcgccaaaatttagttgtagtgtcatatcctattctgcatatgatatattattaaaagtatcccaagaagagcaaatacctcgccaaatattactaccaaaggtttatttctatcaacatatataaggaaaattatcatcaccacatttatatatacttgcttctgacaagtgtggaccacagaggtgcctcttattgacagaacctccaattagctctcatcataggccttattaacatcaagcattttcctcagtcccattccacaccattagtcttagaggtgcaaatcgtgttccaatcaactatgtatcaattaatccacacactcaataaaattaataatgttaagaataatttcatggtcaaatgtttttttatggtgaaattcaatggttaaatgttatatgcatggtttaaaataattttaggccgtcattcaatcataaatcaccatttgaattatgttaagatatttattttaaaatttaataaatttatcatacatgatagattgtgaaataatgattgtataaattttttcacttgtcaatgcataattttttactcatattaaaataacattttgatatatttataatgtaatattaaatgtaatttatgtatgatttaatacacatgcatgcttttttatacatttaaaaaaactaattacaggtggtttgtgagtaaatgaaagatttgtaatttaatcacaataatttgaatcatataattgagattgatcaagggtttgatttttttttattattattattattattgaaagcttattggcttgtgttataaatattgtatggatgttgtacgaacaacaatagagcaaaagacgcaaacagaggaacaaaaaactggaaataaaacaaaaggaggaaattttgtagtttactatttccatggtaattttatatactattattttctattattccattgtataaaatttcttttatacttctccgcccttgcatgtcatgtttgcattctttgatatgttagtacaagcctagctattccttgcccaattttagataggtaaatattctccatagtaaatcattcaacatataggaataggaggtgaatgagtgtattaactatgaagaggtgacatgcatatgagtgaaaggaaataatgtttaacattaatatatacagttaaaactgtgtaggaatgggcgtttaactttatatagtaggttgcataagaaaaaactttatgtagtagataatgtgttatatattttgctacaattatctttcaatgatttatcgattatggtatacataattcttcggttcggtgttaaaaaaacaaaccaatcaaaattaattagtttttttttttttgtcaaattgaaatccaatcaatttgattaacaaccatttttttatatcaatagataatttgttgtttttattttatcttgataacaaaaatcaacattttaaaatcaagtagaatataaaataaattgatttttatccaattaattaccagaaacaatctaaattagtttctttaattttcaggatgatggattagctggaatcaataaacactttcaatgatccttttcgtcgtttaatataggactattacaattatatatttttcccttcatgatcaattctctatcagtttcttatatcactatttgtttttgctttataatattattcatgtattttagtggagtaatattatttagattaagttacgtgttatgcttgatttaatataatttaagattgttaacatttatgaaaatcttcatttgactaatatacaggatccgaacgaaggaaacaagataggagtgttgaattcaaaacaaaaaggcaaaaagactaaaaagataaagagctttggaaaaaatataatttcaaaatttacaaaacgtggaaagaaaaagatcacatcagaacacgttgttggggaatctagtagtgagaatgcttcaaactcttcaaaccctttcaaccatcatatggaggcagatgcaaagcatttttctcctccatgctcccctcttcgaggagaatatcaatatgatgttggagagggcttaggagaggactttatagcaacaacttattattttgatgattataacacaaataaaagttgttctattatgtaaatgggcacaattgaaacccattactgaaaataattaacggttattgtattttttttttatcttttggaatttcattttatttgtatgaaatacttgtgacttatgttaggccatctatacatttttaagtaatttatgttattttttcttttttaattgatgaataatggttatggtgtatatgtgcacttaattgattgggtcaacaacaatgatgatatatatatatatatatatatatactgctaatataaatatttttattttatgaataaataaaataagatatgatttttaaaataattatcataaaaataaaaaatatctaacaatttaacgatttaggattggttagcactataaattaaaatatttacattatagatgcatcttaattaaataataataatatttttcccaaaattcaaacaatcaaattatttcatattttattttatttattatataattatgtgagttatagaatgttttcttttgttcgtatgaattaaacacgatatccaagatttgcaatactaacattaacatacctttttcaaattaaagttagaccctcttgatgagttatagagtgtaagtaacttataaattgtgtgccttaaataaaatcactagttattatattattgtaggccgacaatattctcttaaatattgctttcagtccttatagtattttacatgactaataaagactatttttttcactcactatgtgaaattgttatcctttgaccaagtcttctccgtattttctctctttttctttttcttttttccaaaaatattcaaaatacatttttaaaagatgaaattgaacccatataaaattgggtattcacagtacaaaataaaataaaataaaaaataaaaataaagaatgagaaatttatgcctctgaaaaaaacaaattcaaggagatgacatttttgcattagaaaaataagcaaagacaaattagaacatataaaatacacacacaaaaaaacttaaacattaaaaaaaagcttaacattatgcactaatttgttttcgtgcataaattgattaatagaacttatatataaaagttaagtaaagttaacaacaattaaaactgaattggtactacttttatagagtcacattcactgagataaacaaagtgacacacaaaaaatgaaagggcaaaatttatatagagtaccttatgtactgtttgtgctgttacacaagagcaattaaattgacacttttttcagcacacaaaatgaaggacaggagaaacaaattttatagaaagattggataactgaattgatattttttttccacaaaatcatgaaaaggaaaagataagcaaatttagcgggagagtgggtaactaaatcgacaccctttttcacatagatacgacaaaaaataggataaggaaaggaactgatgggattgtgtttgtctgtttcctcacttaacatccggggaaaaaaatagtccatatgtcatgttataacacaaacaatacataagatactatttataagttttgtctttaatgaaaatcaaaacttttgcgatcgaaggacaggatgaacctaaggtgcatattacctagtatgttgagagctttacaacattaataagtacagtttataaaaatgttttttcttttattttacaaataaaagaagacaatatgtaacaaagaaaacataaataagtaaataaagaaagaagatagtaaataatggaagaataagaatgaaatgaaggaagaaatcttttcaatattcacttccccaattgacacctttccattttaccctcccccaagaacatgctacctagacccataaatgaaatggtcctatcctgtaatactctaggccccaattctccattagcaacatataaccatccaaattaactaaggcaagcatctgtctggaaaaaaatacaaatgatcaacataaatacatgataaggagaaaaaaaaataaagggaaaaatagcacgataatgatgataataataatgataataataataattataatgattctgtaacggatctgagttcgcactctgaagtagtgctaacgtggaacccggattgtatatccgggttgacactctagaaagatgtgcttaggaggttgtagtggtgaaggtctaaccttgatatatataattttgtggatttggaatttgggccatgagaaatgtgtgtgtaggaagaatgttggttagattgatgatatggatttgtagggtgtcgagatcgaacctcggacatatcggacctgggggatatgccaaaagaagctcttaggctgtataatatagcatgagctggacggcttgtctaggttgcgcatatcaaactagacagtttgtccaggttgcgcataccgagctagacgggttgtctgtgttgcgcgtaccgagttggacgggttgtccaggttgcacataccgaactagacgggttgtctgtgttgcgcacaccgagatggaagaggtgtccggattacgcatgctgagcgggacaagttagactgttagtagataaaaattgaacccggcagcgagtgtacgtacaatgaccaatagcgctggagtggcatcagaagcgcgtgatacacgcgcaggatcatttaaataactcatttctcaacgtttctactcaaaaacaccatcatcttcttcctttctccattttctccatttccaagcgagaaagatttcataaccactcaccattgaccaaaactctttgcatgcaactggaaagttgaaaggaaccacctaataactagattccaaccttggttctttctgaaaaccatcagacgaagagattgttttctccaaggacctcacagagttttgatttcgaggggaagacatttttttaaggacgtccaagcttggagaagccgtcctctagccttcttggacatttgtagagagcgtgatacagaggatattggtggttggaaccacaagaatgggagagcagtgtagcacttagagcaggtaagcgctttgttcttgggagttttttccttgactgtgttccaccatactccgagggagtgatgattattgtatgtcatgatgctatgtgtcgtggaagtgaaccagggggaggagaggcctccaagaaccctgagtttactgagattgtatctcaccccgtttggggatttaattttgcaggtgatgctcaatgagaagatggtggatcctgggacaagagacccgagtagggagatggtacaagtaaaagaaagggaaagagaagtgtacaaataaaaatgaagagtgtaaataaaactccctgaatcctaatcaacccggcgaaaacaagtataagtattttaattctgtaaaaaaaataacattttaattaaatttataaaacgctaaagtatacttacgtttacataacataatattctttgaataattttatcttaatttttttataaacaccaaaaaaaattaaaattttgaattatataatttatattaaaaattataaattataaccatcttttgggttcaaatttgcaggcaagaccagtaattgtaagttttaacaataccaaactttgatcaaactgcaagggctctcttcaaggacctttggatcatatctttatacattcttatctcgatcaaagtcgctcatcctattccataattatcaattaatactagtaatttttaaagagtagtaatcatatatgctaaaaaaaaggagtggtaatagtaagttataagcttttttttttttttaggataaataagtcataagcttgttctcatgattattaactttttttgttctaaaaaaggaaactgcaaaaacttttagctatatatctaaggcgcctagcttgacgcttacttgaaacacttattttctttctctcacgcaccaaatgattgttgttatctccactttcacttccttaattcattcgtttatacatttacacgattatagtagtgctttcctctctatatactaaatcattacgtacgtgcatgcatgttgatatatagagaaagagagatgagtagaatggaaatggaagaaggtgggagcaggggtgcgtggagaaggggatgcacgtttcagaagaacgatttcttcccggaggaattaaatcgttcaagagttgggatagctacggaaaagctttgagggagacaccatggaagtttaagaatcgggtcatgacccaatccaaggatgagacggaggtggtggagatgaaggggcggagcagcaaccagatgaagaagacgctcaactcgtgggatttcatatggttcgatattgacgtcgtcatcggttgttattaccagcttcgaggcagtgacgctaccgattcgactgtcgtcttgtcctacattgtttctggcatctccgccttgctatccgtcttttgctacatagaattcgccgttgaaattcccgtcgcaggttttttccctaattattaattaagacagcttactttcagtactttgttttttttccccggagaaactatgaaatggtcacctaggagttccttgtcctaatcaatctccacaaactacgtagttaagtgattacgtgttagtgggagattgacaaagagtatatattcatagggattatttctattgtagattggagttttattatgttagtaagttattttaacttttaatgcaaaattttattttataaattatagagacgaaaactttcataagaaaacatcgatatatgattggttaattaattaaactttgtggtgtgtgtttttcaggtgggtcatttgcgtacttgggtggaatgggagactttgtggcgttcatagccgccggaaacatttaggaataaaagccaagacacaaatagcttttcagttaatgctaggaaattatgtaaaagaatagctatcaagcaagtaaattatttcaagttttgtaaatcctagtggcaaaaaaatttaaataatactttttaaataaaaaaattactaatttgggactgttttgaaactatttacgtttatgggacagtcaatcacgctcaaattgggcgtgattaacccctatataagccaaaaaaatttacttttttcacacttttaccattttactttctctctaaaagttcttgaactttttctctagagtttgtgagtgggttatctctgcaacgaagctctaccaacaagtaagtgaatttaataatttttcatattatttaatatgttatattattgaattagaaaattgttaggaccatctgaaattgttagcgacgtaggtaatttttatctgcgtagatgttagcttcgtagaaaattgttagagactgttacatagaattattttagatgatagttaagtttagggtttaggatttatggtttagggtttagtttttaatttataattattttactaaagttatttagttcagtttagttagaactattttattaaagttatagttaggttagtttatttttttattaataggaagtattaaataagggtattaaattattaattataattttgatttatttaggataattatttgtaatgtaatttaatttgaaggtgttaaattattaattataatattgatttatttatattaagatagtcatagatgactgattcatcatcgtctacttctttatggtctagatccgatcatgagggtgagcctagggatccgacgacccatgttatgcctaccccatataagtaaggtattttgcggaggcgtacccagcacactcacatttcacaggctgtgtggaatgaggacacatgtcgagtgttgaagattcgacgtggtaaagtcacgggaccatactgtgacaatatacctgacatcgttgctgagatgttaggacatactggattcctagatgtcgcacacatgcgacatattcaggtatgtaattctgaattgaataaattaaattttgggtttgaaaaaaactacaaaaatgttttgtttataactgtacatacgaattgattattgttaattttttttatatcgatcttgcgtttattagtgctctggtttagaggtggagaccagagacatacatttcatatgatgggagagatgaccgtcacgttggaagacgtgactggtatcttaggattggacagcgatagcaatgtcgtcaccggatccacctcagacgattgggccaccgtcattgaggacatatttggtcatcttccataggcatagggtgagctgaaaggtggatttctgcgcctgtcttactttgatagacattatgcgcattggggtgaggtagttgcggatcccgtagaagtcatgcggtttacgaaggcgcacattgcacatataattagagcatgactactatgcgatagatctgggggagtactgtcgctacgtcccgttacttggaggggactttggagacataggtagttgtagttagggctctagggtccttgcacatttgtttaaacaaatgtgtgagtgtacatatccatagagaagtgacattggtgggtgtcacgtgcttcttcagatatgggcgtggctcagattttcacccattgctccagctattcctcatcctattcagccggagtggcatgacggacacagttatgtgttattattttctgttattaactatgtattaatgagtcttataagtattctaatgtcagttattttgaaaataggtttaatgctttaagctagtttcgaactcacgagcttctttggtatcggctaatattagattccttttgtctcgaggaggtacgtgttgttatttataagagtttttttcgcttactttgataatttgcatttttactcgttgttctttcataattgtgttttaattcttttgtgcaggtggtttgacaaccatatgtaggctaccacttccttggtgcatctgatcagtaatgacttttgtggatggctagtactacagttatatgctttctcacagtttagtattctcattcggacagatacatgcgacaatttgggagggatcagccaatcccacaaaggcctaggaagctcaaggttgtgcatgacctgtcattgcgaggtaaaccacaggataactgagtccgtaagctgagaccctttatacggcgatgggaggttagagaccggcacatcgacttgccccttactgactggattgatgtcaccaaaccatgagcacatggtttagttcaggaaaaatgggaaacgatgcgtgtcgaagagggctgccaagactggtcgtggtgtacgtgttgcttaattataatgtgtacttattttcattatgatgaatttaatgactggactaatgtatttgttttgtaatttttagattgattgcctagagatgttgtactttgcgactgacactgagcagtggtcaggatacaccatcgattgggtgcataaagagattggtcacattatttgtatcttcatagagagttgtcacctggaggaggcaggcccacatgcaccccatcacagcttcagcacgacccacaggtacatgtggatgttccccgtggtagacaggagggacatgggctagagcgtcgacggaaagccatgcaccatgttcctaagaccataggacctcccaggcctcgcactaatggttggtttaggtctccactgataggttctacatacgacagccagcttgtgtattatgaggctactcatcagggggacatggggaatgagggattcaactaccaaagtcatattcctccaccggcagactcctagacataacctgtgtattacgctactgctttgtccatgacataaggggacgttgtggttgcagcttctgggaccagtagtgacgtacctgctgcagactagagtgttgccgatattcaaaacctgtgggctcatactctaggcggttgtggagattggtcatcacatagaccatatgccaccccacctcctaattatccctggcaatcatcgccagaccagggaactccatacccacctgcaaatgtagagccttcacaagtaggcccttctgaggcagacccttctcaggccattagagtcatagatttaatatacatggtgtatcttactttattacaacatttttgtgtaatggactttatttttcgtgtatgatttaccaaaacaagtcatttagtaacattaataaaaacatgtcgcgttaataaaaacacatgtattatggagttaggattgttggactccaaatctatctgaacctacatgtattatggaggaagtatatctatactataataaaacaacactttttttagccagctgtcgctctctgatgcaccctcagcttcgaaaatgacgtgtcaccctcacaggctttggcagcttcgttttccacatgttgggctaaaatacattctcagctagctttgccttcctaaccacactccatagctgagcttcctcattttaaccgggcatagtttcaaatttcgaattcctacggtttggtgaaaatttgtgtttctaatttcaaatttcaaattcatatttccaattttcaatttcaactccttactccctcatcttccaccgagtctctctgtctgataacaatttcgttccttctctctttctcttctacatttccttctccctctcttcatcgcttcctttgtttcttcttcttttctttgttttgccagagaaatctgaacctagcaagcggcaccacaccatgagccacttcacagtaaacccataccagctccgatgtcgttttcggcctcctcaggtaccggttgcaaaaaataaacgcataatgacattcttatattagcgtcaaatatatttctaatataatttattgttttttattttttatttttatttcagccatggtagtgtgttgttttcataaatagtgtttgttgctgcatgtgagttttgttattggaattatttttgatgtttcgtttgttaccctcaatttcttctttcttcctgttttttttataagcttatatattaaatccagtaaaattccatgaggtgtttgacaaacatgtggtgcttatcaagtgtttgacaaaatgcctcacccaaattcgtacatggaagttgatttttttttatccacaaatactcgtcttatgaataattatttgttgtcctgttttgtctactatgatattttgtataaaaaaaattggcatatgaataatgatttttagtcctgcttattttgttataaatgagatagtagcaatattatttcttaaagttacaatatgtacttggtcttctgcagaacccagaacctgcagttgattttgatacagtggcaaatgtcaaatagcagcatgaaatcaactttggtaagattctaaataattcaatagccaaagttttcctccccaaatgatacaggccatgatttggacatgtaatgattttttatttcagccatttcaaattcatttggattcggtggacaaaactctgtggtggcattttctactttcaagccttgattgcccagcttagcttgtctgcactttatgtagagcatgggtttaagttaattgaaattttgttctctctacatcattgggaagccttttgttttatattcagattttttagttttttttttgtacctaccatatatgtttttgtatttagccaagttaaaatacaaattcaatgaaaaggattggatgatttgatcggatggtctttaactttatagcacatagactaattttacttttaactcaaacaatttatcatttgggattttgttttttgtttagctaaaagacgattatagtaaaattagtctatgtgctttgataaaattagataaaagaagatgatttgggattttcttatcagttcatgttaagataattttagattttgttttagaataagtttagataacatcctatcagttagaattcagttaggattttttaattttaagagcattaacatttctcattgataaggattttctttgaattcagttactttctaaatgtaaaattctaaatgtaaaatttatacagtaattcttattgttcttctatcatttcaaatattctaagccaactttctgcatgtgtttgctataaaaattcaatttttctttctttttatccttttattgcttttgggttagctgattaaatttttggatgtaaattgaagtggatttacgagtcacctccataagttggcttttgtagtaactcctgtacccacattttgttctatatccattttaatgttttgttaaaagaaggtagaaacccaaaataattctcagtttgaaattttcagagaccatggccgaaagctccttcaagcttgaacatctgttgggtactctttttcttcttaatgttttcttttcatatttttttactctgctatttctatttgtggctttattcatgattctttttgttgccacaacacaaacactgggtttattttttgtgttttagttacatggtagagttggtagatagtactgcatctatgtgttattggaagctaattgaaactaattgaggatgtgatggtaattttattacagattccagcacccaagagaggtgagattgtgagacagattggtgaagcattgagggccaagttggatcctttgggtagactggtgtctcttgagatgggaaaaattctcgcagaaggaattggggaagttcaggtatcacaattataactgttctgcaattttttttttggacatattatcaggtttgacagcatagaaatcagagtttagattgtgtataatactataacacttctttgatggcaactaaatcaagataattggtggtgagctttaggtatttctaattagaagtgtgatgcattcagggacatccaaatttatgtcgttttgatgaaattttgtgttctctagctgattatctggtgattttcatcacaaatgttcttagaaatgtgaagggatatgatgtttttttatgggggtcttcctgagcaactgcacatatctaactacatttacattttttttcatcgatcacttatgtttttcactaatcaaaaggttctgttatcagaagatagttctaatttttattccaaaataaaatggttgttctattcagtttttttaagaaaattgcttatatttcagaattttctatattcactgcatcatcttggcttacgccatatatctggttatctgaggatggttgcttttcaaagttacttcattctttctattgggagcattccgtaaatgtttagtgtgtatataggctaactgcactctgaaagcatttgagtgttttttctaattatgcacagaactaaattaacaacatacaccatgggaaagagaaaactattgtgggaaagattttgcacataacatttttatatgatatagtttgtgatctttctatccatcgcaggaaattattgatatgtgtgattattgtgttgggctaagcagacaattgaatggatcaattataccatcagaatgtaagatttttgtgtattgatattaattgttcatcttttctttataatccttctggttacatagttatttaaaatcatattagttagtgatagtctcttgtttttttttttttccgatttctccaagatattccaattttgagttattttgttcttctacttgctttttaacaggtccagatcatatgatgtttgaggtgcgtatttaaagtataactattcatggagttttgtaccggtttatatgatattaactgtaacacatgcttttacaccactggtatggaacccactaggaatagttggtgtaatcactgctttcaactttccatgcgctgttctaggtatgtattttctcatcctgtcttaatgaacatagcaacaagttcctttggatcttagattcagttcaccgttacttataatcagattgaaaatgttagtgcattcattcactgtcattttgtcatctaattttggcatgtattttaaactttacctgaaaatctgttgtgtctaggagtcatcttgatctgtaatcaactagattgtgtgtgaactgtcattctgattaaagcttgcaatatcatcaattcattaaacttcttattatcaatttcatctccatgtttggatcattttcatttgttgatatgttttagctttttgttacttttaagctgctcttcaatcttcatataatacaaaagtaagtcagaatggggattgtgacgttgaacctttgtcaattaaacatactgttggttttattactgactcctactttaaataaatggatgtgtgccaacatatatgagcagatagctttcttcaagtttttcctataaatcttttatcacttcctaaggtatttcaaactaaagaaatatattttaattttattattattagaatatccaaggactctaatatatcttctttattacaaatttttatgttttgataatttaatctgactgttttcatgatttgaatttgaatgaaataagattgtttaatttaatctgctatattagtaatttataatataatatgatatgttcaacttactaaatttgaattaatttagttttgttcatacataactttttatgtttcagatttcattatggccctttgtaagtatgattctttttttctttctttgcatagcaatcaaacctatgatctctatcattgtcacttgagctaaactaagcaactaattatgtgtttccttattattcgaagataatccttatgaattatcatttttctttggttttgctgaaattcatagttgggttccttggaataatttttgaatcattctaggtgcacctttttatttggaaatttgttttatttttcaaaaggaaaagttataactttcaattagttggttaatgaatgatatctgatgcgtgatatacttagtttattgctggcttagtttatcttatgttcaaattagcttataatcaaaatcttacttggagaccttttaaattttcattttattaaatcttaaataataattaaatccaaatgagctcttaatttgcaattcagattatgctattcagggttcttgctcaccattttccctagcttgcctttcttcacttgattatgaacatagatgaatatgtcagattgtcaggataatcactggctcttaatttactataatatcatttgaatatgctgagaagcaagatatgttcttaaggctataaaaaaaagactaggaagcaaacaccccaattctcaactctttgttgtcatagtgagtataatgacttcattatgaatatagttattcataactttttgtgtggatttctaaaagttttacctataatgaaaaacttatataaagacaattttcactacagaaaagcttgattattttactttcttgtgtagaatatttacatttcttgctttcctgttctgtagtgttttactgagtcatctttgatctattgattctgtagttgctgaaaatgttgatgaacaatattggatagcatattcatgagttggtgattgaatctggaattattcctattctaggtttgattaatgatgattgatctcaaatatcccctgaagagtaataaagttcctacttgggctattcctgtaagtttattgctttggatatatcacatgtgaatttttttcgttgaataattacattaacaagattatcttgtcatttactattttgttatggttagatatatgcagttttatatcacacgtcaattcatttattaaattgaaattgctggagaggataacaggaattttttttatcacagttttatcttgtcatttactattttgttatggttagatgtttgttttcatttaattttaggttttcaattcatacttatcacttatgttgattcttaatagtgggcataattaattattagtggcttcttgcttctttgatgcaaacagtaacatctactacataaatgacaaattggataaacgaacctggactttaattttggaccttgttgtgccatcactgttttcatacattcctttgacaattactgaatctggtcttttttgggtcttggaatgaccttacaattcttactctagatgccaaaccttgcacgctgaggtactaccaaaatatggattcagtttcaagtgtgatgagcgagctgagagaagaaaagaggtaaataattattacttgcttctgccttttgtgttacatgagggtttcttttggataaactcaatttaaaaaaatgttattttggtgtccagttctacactaagcttaaggaaaatattcatgcaaaggaaatggaggagagtaacctgcaagcaaaaaccaaggtgataatattttggaaatagcatacaacaatcttttatccttctgaactaatttggaaagagcatacaacgatcttttaccatcaccgaccatggttttagtgatataagaattatttaaatgtaatctatgattttcttactaaaaggaaaaatcattattattagtagtcataaattaagatgttcatgtttatcttacaggctgtgattaaaaagaagtatagacatgatgctactaatgttggtaaagaaggtggctttgctcctaatacccaggtctttaacagctgcttttagttttagtgattaagcatgatttaaaagtaatctatgagttcaattttaatgaagaggtttcttcatttttcattttctgaattgagttagttttctactttggatttgtatattacaaagatttcatgcactcataagatacatgttgattccctttcaatttcctcattttagttgatcaaatcatacattgtgagcatcatttttttggtttatatcacacactgggaatttttctaacctttgtttcagctaaatcaaccttcttttctatctttctagaaacgattctaactatgcataatacactattacacacatgatttatttgtgacagcactcgggttgccttggtagcaaagaagtcattataaagaaagaagtcaaattacttcctgcgagtttctataaatctctcttttttttttgtcttctatattagtagctattatattttgatgtagtcggctgttttggtcttttttgttttgatcaggtaaaagatcctatgtgaatgatatagttaatttttttagttgggttggtctcatttgtagtttgcaagtgatgtgtttgaccaaatgtcttaatcaatttggacaacaaatgatacagaatttgcaagtatggatgtaaaaaaaattgttttatattgtgatttttagattctaattgattcattttagattacccttaccattggaaatgtcttatctctaaagtggaatttataattgttgtacctttgtttttgttcattatagttatactatttttgtgcccataagggtatttttattggattttgttttcctattaattttggagcttcgtttcttctagaaggaaatcttattctcagctctttgtaacatcaattttatttcttacccagcaattactgctgcaccgatttgagtggtcacataaatgatatagtagttacatgggaaaagcttatttcatttttgaataataatgtcacttattatgaagtcataaaagttgcaaagcaataaatagaatagaagttaaatctagaactatcaaatgttaatattctctgtaaaataacatataattatatatatatatatatatcctattttatgtactgtcatttggttagggagtattatgcaatgagcattatgctcacgggctacattttctattcatcagtcatgactctacaactgatattgataagacacctgaatctgaaagtttagctttcgtaaaatgaatagaagcagcttgtctttgaaaataaaccatgataaatgaacccacgactgtgacatcatttgtcatccaaagcttgtctttgaaaaggtatagttcaaagaaagaatatcaagcctttttcctatttttttgttctctagattgatatcctggaagaaagctgaacaccagttccttctgattctatgttatacttctttccctcctttctatgaaaaatgatatactctcttttcattagcattttttcaagagctgatatgcatagattccacctagagttatttatttgttaattatttttcaaatctcaacttaataaaaatgaagaagcaacacaagattaaaaatggtcactttcttgctgttgccaaaaagtattctatattctaaaatggacccattttagtggatgacatacaaagatttatatgtatttcattttcagatatggtgatcatagttgggatacaggtagttttcatattttggactcttgactaactgattaattttgctgactttaaatatacaatgtattgtgagagacctatgaggattggattatttttcatcaccagtagttgcagtcagagatatctaggtaaaagttcattttttagcttggttttgtattttttgtttttccatttttgttggcttatgacattgtgattatttagataaatgcgagactgaagcaaatcaagctatttaaaaaatttgagttttctgacaccacttaatgcttaatattatttttcttggtttgttcttctcactggcataaactctctgtatgctataactctatctctctttattatttatttatatttaggttgaagttgaacatatcataatatctcccatggtttggtgcattatggttcataggtatcattattataatagcaagggtgtggctgtaaacatcatgtctaaaagcaaataaaagcaagtcatattttcaatcattccatgatggatgttgtttagccatattagaattagttaaagtactatggccataatgaactttataaattgtataatatatggaagagctttgtgaatggcatgtgtcatggtattgctgcaggaatattttgcccagtgtggatagatttaatgaagacagtaagcatgaagtatcaagcgtggaaaggacaagcacgacaccattgcttgaagagaacactgctgaaacattagcatctgatcattcccaagaatgctgatttctttgtatattttgatgtctttccaactagaatttgtttcacacaacgatggcacaaagataacattcttttttattttatctttttaccagatgtggatagatttatgtgtaactaacttttgcttttggtaaaggataaattaatcactatatattggtagcatgtccctctactctgctagagattattcaccatcattcttggacataatgttggaaatacatgtcatatatcaattagtccaaattttactttgttctgtaatgcattttttatttatcttcctgattttgttttctttgactgagaatattcttactagcatagttatgagatcaattcattgggctataggatcatggttgaataaagttttagtaaaagtgacaactctaattgaattattgatattgctgataaagtttgcatagaattgtagatttttttaaaatattcatactaaatactttcaggtacatctatataggtgtgatttgatgaatgatgggttgagtttgaatttaaaaatattcttttaacatgtgtaaggaattagtactcttattattttcatgtgtaagtaatatcaataatgtagtaatatcattttcgtgaggcccaacaaaattgacattatttatattcttattattttctttcttttttggtataagcatgttcaaataatgtaaccacatatgatagttgacctctgatcaagaaggaatcaccttttattatgcctgaattgaagtccagaagatggcttcagactgctgatacaacaacaaaaaatttaattccaacaactccatgaattattattattaaaccattattactttagagttattcaataggagaaccctttttttgtgtctttctttccttctccttcagcatgattttttttttagtccctttgaagggataatttatttgtttagaagatctatcccattatcgcttctacacggattttccttctccttgggacaatgctctttaaattataattaaataataaaaataatttttgctacaagaaagttttaaattatttattcactatattctaatataaattaattttaatttcattttttaatgatagaaattacaattatgggtgaaccgcttatgggaaaaaggtttggatgatgaacaattggtcgatgatttccatttcacgtgtgaggtaagaggtttggaagtgtgtgaggtaaggaaagaagctgagatagattgtggcattgacaggtgttactccaaagctgaaaatggatgtgagtaggacagctcatactccaaagctgagattgcatgtctggatgacacctgtactccgaagctgagagtgactgagagtgcgacacgtgtgcaaaaaattagttcttttattatagtataatgtagattagttttaatttaattttttgtgatagaaactataattatcaattatggaaaataatatttctctaatccatcatgggtgtaccgctacggggattttttttaataaaaataacgttaaaatgaaatggttatgtttttaaatatacaaatatttatagtgttattatttaaatataatcaacattcatcgattcatttatcagaaaataataatttgattatttgttataagacaatcaaagttaattaatttaaattactttaccaataatatcataaataaaattattttttattatgctagagataacaattataattaatttgtaaaaattatttttgttgcaagaaagttttaaattatttattcagtatatcataatgtaaattaattttaatttcattttttatgatataaactacaattatcatttacgggaaccaaagttaattgtggatggatgggctgccataagagactactatgatcttttaggggatcatcacatcactttaaccttttatgaccaatctatgtttttttaacttttttaaaagcacttctataatgaaatttcttagcaaattgttaaacacatatgttgtattcactctacaataagtaacacctatgtttcaaacaatgctttgtttatgtatttatttgtttatattttgtgttcgctctataataactaatctctatatttatcgggttattatattttataaattttcatatattattacttcacacatgaaatttttatgttaataatctaacactattcttttttgctatttgtagcattagtatgtaatttattttttcgaattggcagtactatatgatatacacatctaaaacaaaaaataattaaatttgataaatatctaattaaaaagtgaagagagtttatttcttactgttgtatattttaatttataatatagaatttaataggataaataataaattataataattagtattttaatcacaccaagttcatcggattaataatttataatatattttcattgtttaggaaggtgtttaggatcctaatttagacagagtgagttactttattcatagtttcatttttaaagaggctatcccatatgactaagataatttgtgaacaagttaacatacaaccatcttccagatgtttgggttttattatttaaatataatcaagatttgaaatattttaaatactttttatttaattcaattattatgataatcatcataataagaattagttaacatatttattagaaaataatagtttgattctttgttataagataatcaaaattaattaatttcaattactttatcaataatataaaaaatacaaatattttagttatgatatataaaaaataaaattaatttaatattatttaatttatttcctcccataaccaacacaataacatttataatatcacaataaaaaaaattattttgaattactttatcaataatatcacaaatactaatcttttacttatcatatatataaaaattataaccatttaaattaatcacggagcgtagcggagcaatccatgcgtatgcgcacgggttacttactagttagtatataaggtgaagattgttgcacataagttcacacaggtacaaacgtttcgaattctcctcctcgcactttgcaaaactagttttatctcctggtttcactttttagttctccattttatccttcttttctccagacaattccgtttgcactttcatgcactgattcttcattcaaccctctttccttcccttcatttagcaactacactacaatgaagtcatcagaggatcgtgtcatccatgtcaaagaagaacaattcatgatttcaccattatccggtagaaacccagttcacagaactggttatttcatcaaaccttgcgtgcaagactcaacaactcgtcctcaatccatgttttcttctggaagaacagtcactgtcgattcggaccacacaaagttgcttgaagtaagatacaccatgtgaaactgtaaaatgacattgacaacactatgacgcgtgcctgctacaccatgtggaaggataaaatctcagtcgaaattgacaacactatgcactatgcacattggattccaaacaattataaataatacaagacaccgttaacacaaccacacacttccacacaacatacctccgcaaacaaaatttaatctcaatactatgacattcttagaagaaacaagcactcagatcattgttaactccaaattagcattcatttttccaaatggatcaatcaaacacaatcaaactggtgtttcttttcgatatcctaattcaataccaatacataacacccttctgctaaccaatgaccaatttattgatgaaatctactatcgacagtcatccctagatgtaggtcaacaatatttttttcattctctgcaactcacaaatgatgatgatgtttgcacaatgttaatgtgcaatgagcaatacttgtgttggccctacagaaacattatgtaccatcaacagaacacccgatagtatactcagcctactttgatccaccatcgttcctacacatgatgcaatgttatactacaacggtaagtggaacataccacaacaaggcgattttgtgggttattcctttactggaacaaatccaataagatttgaaattccttcataattcaaagttgaaatactcaaggatgtcatcaagcaagttgcgcctgttgaggttcccctttatggaatttacaactcacaggtgataagaaaattattttttcgacaaccaacccatgcaaaatattcagaaactaccatcgaatatcacataatagagttgataagcgaagaagacgtgttaaagatgttgacataatccaactactggaaacgtttttgtccaatataaattttagttatttttaacaaaccagttacccaaatggaagaagacatgtccctatagatattgggcatgatgctcactagcatgattcaaatggatttcaaacatgtccgctgcacaacttctgtgaaataatgattagtttgagtattttcgtatttaattgttattttcattttattaagtaatgtttattaagtttggttatttttaatttttattgttatttcaattgtctgtttcgttattttcattttattaagttgtgtttattatgtctgtctctttgtctcatctcaattatcattattcacagtgtttaaatactacttagaattgcaaaattcaaaaaaaaaaaccttattttaaaaaaacaaacacatatgaattgataaatgatgaaagtctcaacatattttcaacaaattgtgatttttaaaatgaactacattaagatacaactattcaaagaaacattagtaaaaaatcatgaaatagcatcacgattaggacaacctcttcgattatgtccaacttgcttgcaaattccgcatttgatgcgtcgttgacttgtttcaatttcgtccatctcattacgtattctagtggaccttggacgaccatttgcacgcaacattttcctattaggtataagaactggatcttcactccgtggaatagcacgttcattaccaattggctgccatggcaatgagtaagcctgaaccaaattacttaccaggaagacatcattcacatactgataaggattttggcgaacatgtaaagcagcagctacggcgtgactacatgggtatttgaaggccttaaacttaccacactgacaaaaacgttccgcaagattgactgaatatgacctctcacaaccctcctccacctcaaataatgttttatcaacattatatgtgcgtatatggtgacctgtagcaaaggactgattatgcctcatagcatcaaccacatttttgcaatgtcgttgtgaatggtcaacttgtgaaatagccatctgacccctgcttacaaaatattgaaccaatctattgtacgtgtgcttcaccagagcagttataggcatatatcttgctcccttcaacaccttgtttactgattcagacaagtttgttgtcatatgaccaaatcttttcccatctacgtcatatgcacgtgtccacttttctttaggaatactatcaatccattctgcaacctgaggactggtatcacgaaatcgtgcaaacgctatctcaaaatcaaccatagagggagtataacctgcaaaataatcataccattaataatattttgtttacagatatatccattccatatattcaaaataatttttaaacatacctaaattcattagggtcttcttcaatttttcattcctgaacctttgattaaaattattagcaatatgacgaaggcaaaacacgtgatacgcataaggtggttgccaaccagcatgattctctacagcagataatatgctctggtgtctatctgaaatgagacatatgttttgcctttgggttacgtgtaagcgaatgttaacaagaaagtattcccaagcttccaaagtctcatcttcaacaatggcaaatgccagtggcagacattcattattaccatcctgagtcgtagcaatcaataattttcctttatatttgccatataaataagtcccatcaatttgaatcacgggtttgcaaaaattaaatgcctcgcaacactgtctgaaagtccagaaaatgcgatgaaacacacgttttgtctgtatcaatcgatgtccaacaaaatactcgtttgtttgaatatcataaaaagaacctggtgaaaaacgaagcatgtaggcacaccacctgggtaaaaatgcataagactcttcccaatccccataaatcattgtcattgctttctgcttcgcataccaggcctttcgatatgaaactttaaatccatacgaatggatgatcctctcttgaatcaatgcaatcggcacagacagatcctccttaatcattcctaataatgaaattgtaacattcacattaagaatataccttaaagaaccattattaaaggcgtatagaagaaatttaaaaatacatacctactataagtgaagcaataacatcagcatcaaactgtctgtgaccctgtataatatgatcatttagacaattgtgttttccaccccatcttgaaacaagccacttcacaccgtacattggtttaattaccctaaccctccaagggcaaccctcgttatgagcaatacacctcatgctaaacttgttaggggtgctctcaaccacaattgcttcttgatgctccttcatgagatttcgcttaattgcaacttgcgcgtcctttttggatgtaaattcttgtttaacaaacaattcatcccctaattgccatgaacactgcattgaatccaatcccgaaccagaaccgataaaagattcttcttcgcttggataattccaatcaatatatgtgtaatgtggaattccatcccaaaaaggaatgacctcagcacctttacatacaaaatcagtttaataaacatatcaagtaaataaaatattataacatacaaatatacatttgaccacattttcatgaatttcagtcatctaacataccttcaatatgttgttctggttgagtagatccaacgtccgaatgatgacggatttgagacgaccccacatcagtatcttcttggaattcaatcgcatgtacaccacaaatctcatcattatccgacgcactagcatcctcctcaagaagacgatcttccattgcaatattttcatcatcgtcatcctcttcatcgttatccataacccaagtagggttatgttcgtcttcctcagaaacgtttacaactggaacaacatatgatgatgtattatgtgcagaatttaaagcaactgacctcatggataaaacatcctctgctccggtaaaatcaacgtacaattgtaaaaaatctttcctagactggttgaaatattcttccataaccgtttttatgtctttatcatccagtacttgaaactccatgtattgttcatgttgccataatcttgctgtcaacaaagtgatacattggttgtccttcagacctaacttttgtcgtatcttctgatgcaattcaccaactgttgagtttcgattgatacgtgtcaaccttgcttcagctttccttccattagaaaataacataacacgagcacactcatcacctgaattcatttcttgcttcaacgaaaacaacttttaatatcaataaacaatagaataatagaagatttagaagataaggtgtgaagaaatgaatttggagaggaggtttaaataaactgggtcaggtcaatcacgcccaaattgggcgtgactgaacacgtccagattaggcgtgattgactgctccataagtgtaaataatttcaaaacgatcccaaattgataattttttatttaaaaagtattatttaaatttttttgtcaaatgctagctacaaagctatatttttagagcaaagtaactgctctgaatcatcaaccaagattttgtttgagtaaatttcataaattatcttttttgacttatattagtataaaggaaccaagaaaaagagaaaacattagaggaccaatgggattcaaaatttctccaaatcatcacaggcagaatctgataaacactcgacaagttagttttaatgcaatgaggcagaatttgagaaagcatacttaacaatttgatatttaaaaacattatttcaaagtaataaggcattgtttaacatatgtacttcatgcagaaaaatatagtctgagactcgagtatttatttagtcacatggaacaaacttatcacatcagaatcagattgttggtattacattatgcaaaaaacaaagctgatatcagcaagggctttgtagagggccatctgaatcatattcagaaaacacggaatctgattcatcctcataactaagctggttagtttttttagcaatgcaaacctcctttctcaaaccctccaccaaattagtgcctctgctttttttgtatacacccttactcctatccaatagccctttcttcttcaggcttgcgaatttctctctattttgtacaagggggtgattctgcacaagttcctgaccattataggcctccctaagaacaactgtttgggtatcactcctcttggaaatataaaaaataccaggatggcgctcaaatactttagtaaacttctgaggtagtgccaagggtctacgcaagttactagcgttcttgcgctcagtttgcttatggagtgtgaggtgaaggagctcatggaagactccaactatcctttttgtatacaccctgactccaactataatacatgtataatttctaattttaggaattgattctataatatagactaagttataagctttcttctacttcatataaggataaaatagttaaccatttaaaaataaactatcagatttaaaataattgtaaaatcatataagaagatagacttgatgaatcgcaagctgtaaataagcaaaagaactgggcactatatgcctttggcccatgagttggcatttgttggctgaaccaacaaatcctagaacaagaaactattttgtattatagtatagtgacatcctgtggctttagaatcaattctgtcctaggtaactaactatacgcaggtgacatttatcttaatatttatgttgtaaaatcttctacacttgacagccacagccttcaaaacaccaattaattggagctggcaactgaacaaggcacagaggttcctattggctgaagatatatgttcatagtatttagtacttcccttcgttgtgatgttatgttaagggaggatcatacgataggcaatgattgcatacacagctacctataatgcatcatgcatgtgtatgacaatctgaaaaccttgaagttgagtagtgatttttatcatttgaatctattttaaacttcaatgcagaattatgttaggactaccatctgtggagaacagggaaaagattttgaggactcttttggcaaaagaaaaggtggacaacgagcttgattttaaggaacttgcaactttgacagaaggatatactagaagtgatctaaaggttgctactattcttttatattgttcacattggacataactatcgtgtaacaagtgatttttgttatctgtgaaaaaaaaggaaaaacaaagagaacagagtaaaagaacatgctacttacacaaataggaatagcaagttacagtgttacacagccaagttacactaaaaaataaaaataaagtgtaatcttcttaaacgtaaataaatattaagactactcacaacaaggggaagatccttgagatcgagttggtagtgcgctgttgagaggggggcagagccaacaattctgtcaaaaaacaacaatgcaatgcagtgcaaattaagaccttaactaactaactagcaacaaagaaaacaaaataacctaaagcgtgtttactctggtgcatcaaccacgcttcttgaacagaacaacaccagaaacctttgaaaataaaacacagaaaagaaaagcgaaagagagaaatggagcatatgtgagtgatctgagaaagaaattgaaacccgttgagacttacccgaagtgagacgacgccaagacgtgaaaagggaggtagggtttgaggagaacttagaagctcaggactcaggagtgaaaacaggagttttacgcattaggttcgtattttttttaattagcatttgaggtagtttttaaattaattggtacaaaagagtaagtctgatacgaattttgagttagaattttattttattttattttattttttaaatttaagtgataaatttttttacaactttatatatatttttataatttataacttcaaagtagtaagaaattttattttattttataattttaaataaaagttataaatatatttataattttcttagttttagttttatttttatttattattaatatttaatgttagaagtcttaaatagttttacgactttcatatttttaaatttttttaaagttaagtttttttatttccacttttcagtttttttacgtacaatttttaaaattcttaagtttttttaaaaatggtaaataatttcttttgttttgtttaatattttcataattttagtatttttaatattttttatttaattatttttaattttgatataataaatatttgtaatatatttttagttttagttttagtttttttttaatattttggaagtcgtaaatagtttttttaatatgattaagtttttttctttttttagattaagttttttttttcacttttaagtttttttgtatgtattttttttaattcttaagttttattttaaattgtaaatgaatttttaatttaattatttaataaaaaaattagtttggtttaatattttcataattttagtatatttatttttaatatatttttcatttaattatttttaattttggtataacaaatatttgtaatatatttttgttttaacaaacattgaatcgcacacataattttttttttgtttctcttcttttaggtttaaaattaaacatgattgaaatttttaagcataattacattataatcatatgaaatattatatattaaaaaataaactaataaataaaatcagcttaaaacaacacaccgaactgtcaaggtgattaagaaaaaaatttatattaaactcatcaacttaaaaatttctaaaaaatatattacataccaaaattaaaaataatcaaatgaaaaaatatattaaaaaatatactaaaattatgaaaatataaaataaaacaaaaaaatatttaaaattttataaaaaaacttaagaattaaaaaaattgtacataccaaaaaaattgaaaagtggaaataaaaaaaacttaatttaaaaaaaattgaaactgtggaagtcgtaaaactatttacacttccaatagtaaatattaaaaaaaaaaactaaaactaaggaagtcgtgaatatatttatgacttttgtttaaaattgtaaaaaataaaataaaatttcttatgactttgaagtcgtaaattaaaaaataaatacactaaagtcgtaaaattttttactacttcagtttaaaaaattaaacaaaaataaaattctaactaaggaggagtcgttacgacttacccctttttggtaatttaaaaattatcccaaaatgataattaaaaaaaagacccttaatgcgtaaaactcccatgaaaacaagggtttgagggtcgaacaactgtgttgagcctattaaaaaaggctaactcagttttgaattaatgggtttttagttttcaaatttatttttcaaattaacacgtgtctactaatgggttttcactttttagatacttttttatattaaacatttaaatacatgttaaagtgtaatgtaaaaatttgtttgtaaaaatcatatataatgctataattttaaaaaatttaatataatactataattttaaaaaatttatattgtgtatatttttttagaatatgacatcggaattattatttttatttttattataaaattaattttttttattgttgaacattaaattaaaaaaagaataatttacagaaagttaataaataaagtacgaatataatatatatatatatcagtgttaaaaatcatacacttataaaaaataatatattttaattgttgaccaaatatatatatatatatatatatatattttaaaaaaattaaaaatatcattcttataattatgttttccaacagaaggcaatgtgaatgcatggacacaaattactaatattctcatcatgagattatgtgtataaatattgataaagtgatcgttatgtactcccatgaggtccattaagcattagctaagtcattatttttaatatttatagatatttaaatagtaaataatttaaatatattctccaatacaatttaattgtaatttttactgcttgtcagagtttgttaaaaaaatgtcggtgctaaaagataaaagtttaccaattttacaattaaagtatacaacattattcattttaagttaaaattcggatttaagattcaaatattgcaaatttttattttttaaatttgactattttagaactagaacactaaaagaggagcgttttattttttcttttcttttcttaatagacatatgaatttttttattatgatgtttttataataggcattatttatattcatttttcctaacttcattataaatcaattatatttattaatttttcttaaattattatttaaatttatcaatttaatatttaataattaaatttatacaagataattaaaaagaagcttaaaaggaaatatatgaaattttttaaaaaacttgatcttcactcttttacatatcaagtgacaattgtatctaaaaaaaaaaagtggtatcttaaaaaacgttacagtacacatttatatatgtaagtgcatgatttttttttataatgtaataattttactagttttaaaaattatatttaatcttaaattaacttttataaaatgtatgatatataattaatttatcaactagtgcatcacataagaacacacttttaattaattattaatttttcatgttacactaaagtcatatgagtcttattgggcttcaatcatttaaattgaaggcttttaataattcatccttagtgtgaaggaattcatttaaattgattttataaagaaaaaattactttaagatatttaatttagaaaatcattttacattttgaaataaaatttattattttatagaaaatattacaaaaaattaataaaaaaaaatagcatgtccgatggagcaacggactcaattgtttcataatagagatatttttatataatttactttgcaagtattggttaaactacctaatggtacattttttatacaaaaaatgcatagtatttatttaagaaactatttactatgttttcaataatacataaggcaaaattatgacatatatgatattaaatattacaattaccatacaaaataaataataaataaattttctattttttatataccaaatactttttcttatttttttttaatcttcttcacatattatgggaaaaaccctttatttaattgtcaaccgttaacctataagtgattttataaaaaaaattgaaattactttaaaatatttaatttacaatatcattgtacatttttaaataaattttattattttatgtttcaataaaaatggaaagtatgcccaatcgaaaaaatacaaagtaaagagttcatatgattttgaaaagtattaataacatatttcaacacacttctttgaaaaatattatattattaattaaaatttattaaaaatgatacaacataaatataactcattaaataaaaagtgagattcataaaattatctgatttctaataaattttatattaataaaaaagtattttaaagagtgtactagtaatacttttctatattttacacaaatactgtttttaattaattatatatatatatatatatatatatacttttacatttttatttagttttgaattcttataattttatttaaggaaatcaaatgttttgttaaaaataaatattttttaataattaaaatgaacactataatagaaattatttttaaaaatatgtaatattaaaagaggaattaaattagaaatttaattataatattgggaatgacaatagatattgtaataaattataggttcaaaatactattttgggtattattataaactagtgagataaatttatttattaatgaatttattaccatggaataaaattctataagtgagcacaagataatatgttataaagtacttattttgtctatgtttgataaatattcaattaattgaaagatgaaaaactgattttcaactattagttattaggttgttagcttataaattaaaaattatttgataaaattagttcttgaacaaactgttaaaatgtaaactaacaaaataagacatatttataatggttttatataagtactatttttattttttacctaattaggaaactcttattaatttttcaattcgtgggcaggtaaaatattttatttaaaataaatattataataattaaagtaaatattacttcaatacatttttgatcttgtgcattaattattttttattataatatttttatttattttaatttataattaaatgctacttcaaatttcattattttatgtttgaataaaaaatataaataaaaatgtaaagcatgctcaatcgaataaatataaagtaaagagttcataaatgcaaaataaatagcttgatatataatttccacattcctgacggaatatattccgtgggacaaatccgttggtaaataaaatattttggacgaaaacttaccgacggaagatcttccgtcgaaaattcaataatttccgacgaaattttacccatgaaaaatttttcgtcaaaaattaaaaattttctataaaaaaatccgtcattaaaccatatatttctgatggaatttttttcgtcagtaattccaagattttttttgtagtgtgtgctttatatatgcaacatttagtagtatataataagtcatgatgaatgtgtgtgcctaaattagtaatgaacaagaaacgccttctaacagtacggggtacaactttattttctataaattaatatgttgaggtttcttttgtaacatcctcaacattttattacaattacttatggaaatgagatgatatttggatacaagtatgtttaaagaaaaatgactaaatcactctttccatgaagtagaaattactcccttaagatgaaaattacaaaaatgcccttgcatattttggaaaatgaccaaaatgcccctaggatgaagtggcaaaattaccaatatgcccctaggccaaaaatgctcaaataactttagaaattttgtagaaacctaatgaaattatagaatatacttagctaactaagtatcaaaatattttgtgacacaaaactttagaataaaatttctaggaattttacaatataacaactttaaggctttatttaagaaaattcaagcataagaaaaatatggaaaaatgatatgtaaaatctaaagaattttctcttaattgtaagatgtataaacctatttaataaaatggtttagtaattttgatggtcagaagaagaatagaccaactaaaattaagataagaacatttttgtaggcaaggatgtgtatcattcggtacagattgcttgtgaataattttaaaactattattaaagccaatttttgaaaatctatagagttctattattccatatgatttttagaagaaagaattcaaattaaatttaacttcttactaggaattactatgtgaaaaaccataagtggaattagattttactttagcatcaaaaatgacatgtaatgacataaaaggaaggaaaacttgtcatcctaccccttaagcttgaagttcacatgtggaatgatgtagaaaaggggagaagatttatgaataagccacttgtaaagacaagcttcatgaagaagacaagtggtggacacttggaatatgtatacaagatgagaagaaaaatcttctcttatttcctttggtagaacacgtggatagctctagacattatttcaacaatctcaacggtcaaaaattacatatgtgagatagtagtatacctttaaaattttaaagagatccaacggttaacgaatccagaattagaattttactaaaacaggtttgggataaaactcaagaatgaaagaaaaagcataaaaatcttccttggcaagctacttcacgaaaatgcaagagaaattgagaaacttcaagagcttggacacttggatggtggagaattaagagtctttatgatttggacaagtgtagggacacttgtaaaggggtggacaagtggaaaggtaagttattatggtgtaggagatatttttccataaagtgaatcctaaaccactatataaagggggaagggggacctaagtgcaagacattctgcaagctttcctctctacaccttcacgtgaacatcctctcttcatattaccttcattacatctttctcctttagagttagaatcaagtaagaaaaagaaaaccccaccatcttgacaaaatttcatgagaaacctagcaaccttagaaagagtttttgacaagcttagtaaaaagatatcaaggcttcatttcttagaggattctcccaaggaaggaaggaaggaaggaaggaagccatttatccattcaatttcaagaatcaaactcacttgaggtaggctaagcttaaatctctatttaatctttggtttggattaatttacatgctttagtagggtgaattatggttattatttaggcttgaatttcgtgctatttgagggttattctttgatgagaatatgttgatttaatccataagataggtgatgatttatacccatcaatattagtgatgtatggaagcccatttgatgatcttttgaaggtgattttgatgatattttgggctgtctgttgatatttttatgaaaagattttgatttaaattttagaagtagaggatgaatggtatgtagttgaatggtttaaatacttgaatgattcattttgaggattaattagtaaaggtggtaagtgaaaggagaatcaaaatgcatactaggtttgaatcttttcttgtgaagttttaaaggaattagatattatttatattgaggattattagttagattactaacataattttttttatagttaaaaactattctctggttatgcataaatttggtaagaatcttacttgattaaggtatggtggtgtaaccatacttatgatacatatgatgatttgatgaaagtatttttccataaggtaatctgtattttgctcatggatttgatttttattatggatggatatttatgtgataagataagataagtggattactattttcaagtccagtacgaggctttgggaaaaacagaatttgatgctacatacagtacgatatgtagtacccaggtgcaaggatatatggcaaaattcatgcatgtttgcgtaagactatagcagcgtccacactcagtgtggccacatacagtacgatatgtggaggccatttgccctgggatagttcatctcatgcattcatatagtttgcataatttttgtggatgtatttgattatttgatgattttactaacctactaataaggtcgggatttagctttgcctactaagaaattttatttctcacaaagttttgtttcatgtttttcttagatgacaaccatggtcaggttcattgaagctctggagtagtgaggaagatatgtactagactgaagtatgaaaattactgtacttgtattatatggacttttgtaacaagaactatggctatgtataatgtattagtttcaaaacttttgtaagttttacgttttagaagttttactaatatacgcttcttagaaacttatctttaagtaataataaaattaataaaaattagtagaaatttaggtcgttacatctttactattaatttaatttgatgtatatggttcttttgtttggttttcatggattattttgtccatattttgatatgtgtccctctgattgaaaaatttacaacgtatctataaatctatacatattaataaaacaacgttggcttttaccgtttcccagtttctccttgcttcgcagcttcggtgagcttctccttagcttctcccagcttcggataagtccttcatccaattgcatctcctcaccaactgtcagggctgaatactcgccaactccagcattgagtcctcaccaactctgctaagtacacatcccaattgctatcatttcagggaaaattcaaagtatggcgagattgctccatggagtttctctctgccgtcaataacatttctgtgtcagttgtcatgcccatgctggttgtgatacacatgcccgctgattgctcaactgctattttcactctacctctacgtcttgttttttttgggtatatagtattgactgtcaaatgaagaataactgaaatcatcttcctactcttctttttcagcgagctcaacgagccccaaacattaagagagtctgattcgttctccctcgtctgcttctgcatcgacctgaacgtttagaccccgaagcactcattaaactgacattaatggcacgtggtaggttgttgcttatgttgttacaaaatgttgctatcgtttgtgtcattttaaaattattttttatttttgcaccagtttttcgtaaactgaattccgttgctgaagttaatgatgaaaaagaaacttggaaaattgttgttcaagctttaaatgtgtggagtatacctaaaggagctctctgtaccattgaggcaattttggttgacaaggaggttagtttctttgagtgttgttgtcaactttgtatatcagtgattttgtgtaccataacttcatatcagcaacttctatgtatcataagttcgtatatttatgaaccaaggtgataaaatattggcctagatgaggaatgttgatgttgggacgaagggtgacctttttcgtgttggtcaatgctatcttattcagaactttgaggtggacaagaatgttggtcagtataaggctaccaagcatgcttttaaaatcaacctggtaaagacaactaaaattatgcctcatgagatggctgacatacctgagacaatgtataattttacaaagtttgatgtcattctcaatggatctgtcacatctgattatttgacaggtgacatttagtttaagcgtctcttgcataaatgagttatataacatgttatttattaaatgtgtttggtaatggtatgttcttgaagatgttgttggtgaggttgttgaagttcttcaatggcacctagaagggaaaccacatagagtttctttcaaactgaaagatgaatggtaatgtctggttattgacaagtaacttattttgtacttaatacagttattaattgttgattcataacatgaaacagtgacaatgttttgagttgtactttatgggaggggcttgctttagagctgaaggattatttggataaacatgtcagtggtcctgttgtactgttgatgagtcgtgttttcgatgttagttttttgttggttataaatggttgttattgtaattgaaaattggtggatgcaggcccttatcctctgtcaatacaaaattccatgtacggttctcgcatctttgtcaacagtgacattaaggagatagttgaattcaaggatcgattgaggtttgtaattatggaatctctttgattatgttattgtgttatatttgtatattgtttaatattatagcatgcatccatgtcaaagtatcaagacatttggccaactaggaacccaaatttctggttcttcttcttattctaatgtggatcgatttttgtataatgcacaagtgaagaatttgcatcaaattagccaagttaagaaggtacaatggtaaatttaatttgcataaacccagtttagctaaaccctgtgtccttaacaaaaaactaaaatttccctggttagaaatcacggcgtcgtgataaacccgatccgcattagccatttgtttcagaaaattccataaacccagtcaaacttggtgttgtaaactcccggtccatacttgtcctctcatctaatcagcttaattgtggtacggtaaacgtttccagttaaacccgacgatgtaattaacccattttttttgttttgtgttgtaggaatgtatgtgtgtgactctggctactttacaaaagttgttgatagccaagggttgggtttatgatgtgtgccccaaatgtaacaaaaggattgatgcccaggctttgcctgttatttgtgctggctgtggtaatgaaagtacaagctatatatcaaggtagtgttgccaaaattcatacattttggtgttgctgctcattacttaattgttgttttattgttgtgcgatggatatcgtattgatgtcaaggtaactcagccatctgaatcggtcatttttacattgtgggatcgcgactgtgtttctttgataaatgaaagtgtagatgaaattaagcaaagaatcattgctgaggttggatattatgttgatgcaagttctacgctataatattgtttgatgcaagttccacgctataatattgttctgccatattaaaccattgtggtgtttgcaattactcaggaaggcgtatttgatgctagagatatatcggagtgtctcgattgtgtgttgggcaaaagattagctttcaaattcaaagttgtgcctggtaatacacaacactctgtttcttagatatctcaagacgattcagtggtgagcagtgttcttagccaacttcaaccgttgacgtgcaggttttgtttaatgttatgttagtccattttcataactgtttttatttgtttaatatttggtaaattagccttttaaaattttaaaggatgaagcagagccatctatgtcctctgtgcgtcggaatgatgatgttgttgacagtgtaaattctttggtctaaaggtttgttaccattgttatgcttgctaaacgtctaaaggtttcttttcattgttgacagtaatgcttctcacaaactgttgagtctgatacgcatttgatgcagtccatgactccaactaagcggaatttgccccagactgatattgagttggaaactacggcatatgaggatttatcataaatacaattatcttctactaaattgagaaagcatatgaagactgagaaatgatttgaaggcctggtttaaaaacttttgttaactgagttttatcttattgttagtctggattgtattcaataattatttcaatgtcgaatattgtggttatgacaatgatatgtgttattttttcttgacatttttggtcgagtcgattcctgaagtgagatttgtagactcctcgtgaatgttcattgccgggtatttataaactgggaatatgcgtaactcactcgatactcggacgttaacaaatgattgaaattcaaaagtatcccggaatcttgacatttttggtcgagtcgattcctgatgtgagatttgtagacccctcgtgaatgttcaatgtcgggtatttataaatcgggaatatgtgtaactcactcgatacttggacgttaacaaacgattgaaattcagaagtatcccggaatgaacaaaacaatcgggaatatagaaatcgggaacaatgcttatatatataaatggtttaaaaacagttgttgaacacttggttccgagtcgattcctgatgtaagatttgtagacccctcgtgaatgtttaatgccgagtttttatgaactgggaatatgcataacgcactcgctactcggacattaactaacgattgaaattcacaaacatccccgaatgaacaaaacaatcaggaatatacaaactaggaacaataaaatggaagttaaactgttagaaagggtgaatcacagttacacatttcaaataataataaattaacaattttaattactaatgattggacatggacatgctaatatcattcaacaattcatgtcaatatcatgtgattgcacatccatattatactcaaacattaacaagttaccgcaccattaatcaactaatggtaacagtttaccagttcaagggacgagctatgggctacatgtacttatatctggcttaagtcttcctagaccttttgatggttataagtaaattcaagactgatcatgttgaattactgattatccatactgctaatcatgctggtacgagagaggtgaggcaaatactttataaccaaattataagtatgtaatctgtgaattaaaagtcaaaagaaacaaatagaaaacaaacttataattcttttgcaccaatgcaaaagcatacaaaatcccagctacagatttgtgcgacttaactttctgaaaatcagtggaaatgtatgataattggtcagtcagagtatgggcaaaatctttcatttacctcactgtccacattaacaggtcatttcacgaaaaagtaaaagaatggccaaaatcttaaataacaagttgtgattggtgtttgattcagctgtaatgatggaactcacaagctttttgttaaatcacacttacacatttcaaataataattaattaacaattttaattacagatgattggacatggacatgctaatatcattcaacgattcatgtcaatatcatatgtgattgcacatccatattaagatttgtgtgacttaactttctgaaaatcatttgaaatgtatgataattggtcagtcagagtatggactaaatctttcatttacatcactgtccacattaacaggtcatttcacggaaaagtaaaaaaatggccaaaatcttaaataacaataataattgtaaaattataattataatctatacatattaataaaacaacgttggcttttaccgtttcccaaaagaaggttagaaaagctaacgtgtcatgcaattgccaaatgttagcttcgttctccacctgtcaagctcacagaaagtgtgaggcttggaatgcacgtgtcaagctacacaattgttcttcttcattgacacaaaaaagccaataaggtctaactaaaattttctttggtatagttttgttgcatacaaagttgataatcatgctgacaaccattgtcaagatgtgaaacaactttggtttatggtattattgatatattattcagcacactttccgtttcacattccttcaatgttaaatacattttcaatcatagtaaatcgtcaggttattcaaacatggaacaagacattgttaggacaaatattgatgctaaagctacaaggaaaaaatgaaaactgatattacaaagaaagagattgggcaaatataagtatgatggtgcttacagaacagaattgagcaatgaaagtgaaggttggaaatgtctctttttattcacattgcccttgtctttttaaatcatctgtgatactaatgtaaataaataatgtttttaaaattgtgttagatgcaaaaacaagtaatattttaatgcaatctgattttgaggatgaactctcaaatgacattcatcattctgttaatcacattgctacaggtttgtctgtgtatccacaaagtatttagttaatcacaatgtttctaatgtcaaaataattctgtgtactgttttgggatgttacagttgcaagattaagatggaggaacatactgcaaagtaagtggttatcaaaacagaaacagaatattactcaagacacacactagctaccaacatgaaggttttgcatgtctacattaatatgcacaaccttctattcttaattattttgtcttaacaatgttttgttttgtaggatatgttgatttaggagatgctactgagacatgtccatattgctaagctgccatgtggtatgaagaaagtttagggaaaaataaaaaacatgttaatggcaaatatagtctttgttgtagtcttggaaaaatacaactaccttttttgaaggatccaccagaactgttacagcgattactatgtgatcaacaatcacgtgagagcaggaattaccaacaatatatcagaagttacaatatgatgtttgctttcagttctttcggtgccaatatagatagtcgtttgtcacatggaaaaggtccaccgatttatagaattcatggacaatcttatcatttaattggaagcctattaccaatgcttgggaaacctccaaaatttgcttagctgtatatttatgatacggataatgaagttcaaaatagacttggtggaagaaggtttgatttatgctattattgacatattgttcggtaacccgcgttaaagccggtaactatgtattgtgttgtgttgttgactgtatatcctacaaaactgttagtttattttgtccttgtatttgttaggtcaaaatggatcctgaagtcaattgactttgtatatcctagaaaactattactttattctctccttgtatttgttggtgatgtagctcagcctatgaatagagatattgtccttgaaaaacagagtggacaatagcaaagaattagtgaacttcacccggcttatctgggattgcaatatcctattctatttccttatggtgaagatggataccgcaatgatgtcaagtatcgagatatggagaactcagcagaaaggaagagaaacaagcttactatcagagaatttatgtgttataggttacagttcaggaaaggagaaggtcaaactttattgagatctagaagactttttcaacaatttattgttgatggttatacaatgatggaatcagaacgattgatgtttataagaacacatcaaaaacaactacgttgtgacaaatacaacactttgattgcctcacatgaaggagttgataatcagtgtggcaatagtggaaagcgtattgtccttccttcatcgtttgttggtagccgcatgtatatggatcaattatacttagatggaatggccatatgcagcacggttggattcccagatttattcttgacgttcacttgtaatccttattggccaaaaattcaaaggtctgtgatagcgcttaatttgactgcaccagatcggcctgatgttgtcacaagaatttttaaattgaagctagaacaattcatttcaaacttgaaagataaacaatttttgggtgatgtagttgcatgtaagacctgtactggaattcacttattattatcaactttaatttttttgcttcgtgttttgtttgataatatgattgttgcagatatatacacaattgaattccagaagcggggcttgtcacatgctcatattttactttttttacatccttctagcaagtatccatctcctgaagatattgatagcattatatcagctgaaataccagatccaattcaggaggcacaactctatgactgtgtcaaaaatcatatgatgcatggtccgtgtggctttgctaatagaaggtccccatgtatgaaagatgggagatgttctagattcttcccaaaaaaatggcaagttaaaattgttgttgatcaagatggctatccactttacaaaagacgtgatgatgggagatacattaaaaaaaatgaaatcatgttggaccataggtatgtagtaccatacaatgcaaagctgctgttgaaatatcaagctcatatcaatgtagaatggtgcaaccaatcagcatccataaaatatttattcaagtacattcataaaggatatgatcgcataacaactgttgttgtgcctgtgcaacatgatggtggaacaagtaatacatgtgttgatgaacttaaacactatgtagatggtaggtatatttctccatgtgaagcttgctggagaatattttcattccatatacacaagagatcacctgctattgaacgattgtactttcatttacctggtgaaaattcagtcatattcgaggatgatgatgacattgacgctttgttgtcaaagccaacagttaaagaatctatgtttacatcctggctacaatctaatagcatttttgcttaagctaaaaatctgacttatgtatagtttgttaaaaaatttacatatgtacctaaggacatatattggaagcctagaaaataaggtaacaccattggaagacttaactgggttccaccaagtactggagaattatattatcttaggaagatgttgacattggttaaaggaccaaccagttatgaataaatccgtacaatacgaggtcaattgtatccttcatttagagaagcttgttttgcaatgggtattttgcatgatgataaagagtacattgacgctttggcataagcataccagtagggttctggtatatttttaagaaaattgtttgttacaatgcttatatccaatagcatggacagaccagaccatgtctggcatcaaacatgtgactatcttattgatgtgattctacatgagcaaaggaagcttagaaacatgtcaggtaaactacaacaaatatatatgtgtcatataatccgcttcttgtcttaacatatccaaaatgacatctcattgtttttattcatagaattgcaattgccaattaaagaattacaaaatttggcattgctacatattgaagaaattctgcagtccaataaaaaatccttaaaggattatccaaccatgccttttccaactgatgcagtacaaccccaatttcaaaatagatatattcatgctgagcaaaattatgataggattcaattgcaatctgaatttgagtcatgcttcgccactttgacaggttagataataaaataaattacaaatacaatacaaacaaataaattatacactatgtaacaggtaatttattttattggaaacccagatgagcaaacaaacgtgttcaattccatcatgaatgctatcaacaaacagcgtggtggagttttcttcttatgtggctgtggaggtactggcaagacttttatgtggaaaacacattggcctgtgcattacgttccaaaggtgaaattgttttaacagtggctacaagtggtattgcttcattgttattacctaatggtagaactgcacattcaaaatttgcaatccctgtgcctactttagagaattcaacttgtaatatcaaccaaggtagtgaattggctggcctattacagtcaactcggttaatcatatgggatgaggctcctatggtgcacaggttttgttttgaggcattagacaaatctttaaaggacgtcatgcatatgtctcaagaagatggttagccttttggcggaaaagtggttgtttttggaggtgacttttgccaaattttacctgtcatacccaaaggcagcagatcaaacattgttaatgctgctctaaatgcttcatatctctgggattattgcaatgttttaaaattgaccaagaatatgcggttacaacataatgcacaaatgtatgatgaaaaaattcagaagttttctgactggcttatacaggttggtgatgggaacattggccaaggcaatgatgggttttcagatatagaaaattccaacagaatttttaattacagatttcaatgatccaatagacaaaattgttaccaattcatatccacatctgaatcacaattataatgatcaacactttctcagtacaagggctatacaagcttcaaccattgaggttgttgacaaaataaataaccatgtattaaacatgatcccaggtgaggaaaaataatatttaagttctgattcaattgacatgacagatgtggaagcaagcctagcttaccaatctattacactggagtttttacattctttaaaaacatctggattacctaatcatcaaatcaggttaaaaatagggacacctgttatgttgatccgtaattttgatcaggcagaagggctctgcaatggcacaagattaattgtcaccagaatggctaatcatgttattgaagcacgaattgtttgtggtaaaaatattggatccttggtttacattccacggatgtcattatcaccatcacaatctccttggcctttcaagatggtaagaagacaattaccaataatagtctcatatgctatgacaattaataaatctcaaggtcaatctcttgaatatgttggagtatatcttcctgatctagtgttcacccatggtcaactttatgttgcattctcaagagtcaagagcccaaatagattgaaagttttcattcatgacaaagaaaaaaaaaaccacaaactaaaacaaccaatgtggtctatagagaagttttccaaaatctatggtgtgtgctaatatttatacttgattatagaattgtcattttaaattgatgtatttatagtcataactagtctcttatatccaaagctgctataatttgtgccttcaactaaattttgatgttcctgcagatgcaagtttctacagtcatacgtaacaggatgatcacagcaattactgaaatattccaagattaagcttcaattgtcatatacaacagatgatcacaacaattactatgataagcttgtattgaacaaatctgcagttttttggttgttacttgtattaaatgtttgtttttgttcctattctaatgtgcatagctttttgtataatggacaagtgttaaaaaggtatcaatgatagtcggtgtaaacaaattaatactcatgatcccggtttcacccggttgatatcattacggttggtaacaatcatgtgcatccggggtgtattagttggcaatttcatgttccagtactaaagggtttccctaactggtttttcgatttgatgatcttgtaaacgatatgctttttatgtatcgatttgtttttaaatcagtgttcccggtttgtatatacccgattgttttgtttgtttcgggatgtttctggatttatatcgttagtcaatgtccgacaagcgactgacttacgcaaattcccggtttataaatgcctgcaatttaacattcacatggagtgagaatatcgtgacatgctttgagtaggcacggaaaaactcggaatcgatagtgccaatttgtattataccactgttcccagattgaatattcccggttgttttgtttatacccggtttatatattcttggttgttttgtttattccgggatgtttttggattgctatcgtcagttaacgtccgaaaagcgagttacttatgcatattcccagtttataaatacctggaattgaacattcacgcggagtgacaataccgtgaccatctttgaatacacactggaaatcctggaatcaatagtgccaatcctggaatccggtttgtttttaaatcaatgttcccgatttgtatataccccgttgatttgtttgttccgtgatgtttctggatttctattgttagtcaatgtccgacaagcgactgactaacgcatattttcgatttataaatacctgtaattgaacattcacgcggagtgagaatatcgtgaccaactttgagtacgcacagaaaagcttggaatcgatagtgccgatttgtattatgtcactgttctcggtttgaatattttcggtcgttttgtttatacccgatttgtatattctcggttgttttgtttgttctcggatgtttttggatttctatcgttggttaatgtccaagaagcgagtttacttactcatattcccggtttataaatacctggaattgaacattcacgcagagtgacaatactgtgaccagctttgaataggcactggaaatctcggaatcaactgtttctggttgatataatcccggttgttttgtttattctcggatgtttctagatttctcattagttacgtccaagaagcgaatgacttacgtttattcccagtttataaatacctggaattgaacattcaccctgagtgactaccgtgatcaactgagtaggtatgccaaagcccagaattgataacatcgttttttgtatgttgcacaagaatttacatcaaattagccatgttaagaagctatcaatgatagtcgctgtaaacaacataattctcatgatgccgatttcccccgactgatatgatattataaccagattgatttgtttattttgggatgtttctaaatcagtcgatagtgactattcgcgttccgggtacgttatagatattcctggtttcgtaggttcccgaatttaaacattcccgaggggtctacaaaaataatagttagtcaacgttcgagaagcgagcaacttacgcatattctcattttataaatacatggaattgaacattcacgcggattgagaatatcgtgaccaactttgaccaagtacgggaaaacccggaatcgatataaccaatttgttttgaaatgactgttcccggtttgtatattcctaattgttttgtttattctgggatgtttctgaatcaatcaagtgattgtccgacttccgagatggttaactcattcaaatcgtaaattattttatgcttacattttttatttatttttatcacgactttaatgtttaaaggtattttttttataaattttagatcatttttttagttaattaaaaattaatgtgttttcttttatagttatatttaatattttttatattgtttttttttttatttttttattttactattgacgcgctactttgggtttttgacacgcgcgcatttaatgctgggtcgtttcatactgtgcggtaatgatgagttttgaattgattagactttttccctctcagacgtgacgcttcgcatgcgtctgatggttttgtgacattgacacacgatccgacggttaccattgcatacatatccgacggttatgccacgtttcctgttaatcagacggttacctttgcatcctttgttgggcctatatatatcccctttcgtttttatttcattttctctattttgttgcttcttctttctgtatattgtgtcttcgaaccctcattcctgtcatcgctagcattgcaccacctcagttttaacaaatcttcccaaaaataggtacctccacgacgatacacctcttgtttttgcttttactttgattgtagtctgttagttgttcttgggctactgtcaagcttttttcattttctggattttgtttgtttgttacaaatattatgattcttcatccaatttccttatcttgttggaactattttagttgttcaaattctttgaaaattttctttggtccttttgtaatgaggctttctcccgaagaagaggcaagattatgccaaactattccacaaaggactgggcattggatttttggttttcccctttctaaagaagatagagaaaaggctctgcaacgtccatatactggtggggttagtagacaaaggaaagttaaaaatccccaaaacaaaactcctttacccgaaaccaaaattcttttacatattagtaggggtggaagtaggccaggcagcctatcaggggcctatggcctggcctaattaaggcctggcttggcctggcttgtttattaaaaaggacaaatttgagctttttaaaaagcctatttaattaaaaaggccaggctgtaggctttaaaaaaaagcccatgaagcctgaataatgggcctgtataaactaaatccactcatagtgacgctcaccgactcttggtccatctgttcaatttgtgcctcattcattaattcctcattctcattcctcactttcaattttctttctaaactttaaaccctaacagaccaacatagttctcattcctcgcctcacctcctacctcagtcgtgcaccgtcatcttctcagctaccacatcccggcaacagcaacggcaacgacaagaaggagaatccttagaagacgcgtctcttctagaaagatcgaagctaacaacgtttctcactgtaattcatctcttcaagcttctaatcgcgcttctggtgcttgcttctgcttcttttcgctctctctctctctcttttattgtttgttgtttgttcaaatttaataattttttgtagtttattttattttcttccacgctttcatcattcctctgttacaatttcctctttctttattttagtttttaatctattacttttaataatgccccaaaccttttctattggtggcaattggcaaatcatttgaagaaaccttttctggtgcacccactggaatgctaacacaattccgaaagccagcctccttgagtgaaagcttatcaatttctccttcaacctgttatcatcattggactgtaataattcttttttttttccagctttcatttggaaattcctctgttacaatatagtagagtctttgttgttacagacttttctccttatttttgttacaatcaaaatcttagtagttgtgattttttaagcatagcccaagaattatcacttgcattctttgactttaattctaatttccaaatttcacatcagcatatcccatacttatatgttccttttaaaatttgataattgacagtggtacctaacaatagccaaatttctatgggcagtgagacaatttttttagtattttggattttaaaaacagtgaggttgagtactatattttaagcatagcccaagaattatcacttgcattctttgccttcaattctaatttccaaatttcatatcagcatatcccatacttatatgttccttttaaattttgataattgacagtggtacctaacaatagccaaatttctatgggcagtgagacaattttttttagtattttggtttttaaaaacagtgaggttgagtactatattttgtaggcaattctgcaaatctgtttacttccaacaacttttcgtctacaattttaatgtttaagggtgaaaattatcatatttgggcagtcaagatgaagttttatttaaagtctttagatttgtgaaatattgtgatctctaaagctaactcaccagcttgcagacctgcagtggaagatgagaaacaggctggtttatttgtttttgttccttatactcagcatttcaagtttgcattgtcattaattttgctccttctccattgttctgttgcagagtattaaggaaacctaaccttgatggctgaaactacacctactactaatgtgcctgttaatgatactactcaacccacaccagaagctaatggacatgacaaggacaactccagagatgatgatggagaagaatctgtcatcaagccaaagaggagaaaaacttcaattgtttggcatgattttaatgaagttaagaattctaaaggtgaaacaaaggctgcatgtaagtattgcaaagcccttttatcaactggtgggaggggaggcagcacaagtcatcttaagaggcacagtgaaatttgcttgcaaaggaggttacagatggcaaaagaaaagaaacaaccatgcattccatttatccctttcaattcagctaacccatttgttaatccatgcagtagatactctaatgaaaagatgagagaaattattgcaactgctgttatggtacatgagttgccttttagcattgttgaggatgaagtttggatgtgggctttccaatatgcgaattctgattttcagaaagtaagtcgcaaaacagtaagaagtgattgtttagcaatatatgaggcagagaagaaagcattgaaggaagaattgaaaggtgtatccaagattagcttaacaacagatatgtggaaatcaagtcatcaagtagttgagtacatggttataactggtcatttcattgatgcggagtggaaacttcagaagagggttttgagctttgtaaaagtacctgctcctaggcgtggtattgacgtagctgatgcaatattcaagtgcttgaaggcatgggggattgaagataaagttttttcgatgtccgttgataatgcatcttataacgattcttgcttgaaaaatataaaggatactttgtctctgagcacaaagctagttcttcatggtagcctatttcacgttagatgttgtgcacacatacttaatttgttggtgcaagatggtcttagtaagatcaaaaccataattcacaacattcgtgaaagtgtgaaatacataaatcataattattcaaggttaaaggcatttagtgatgttgttgaacaaaagcacctaaaagaaaggaagcttattattgattgtcctacaaggtagtaaaatttatttatattttaaatgccttttagtacatttattgttgcctgttttacatggtactaacaattccatatattcaggtggaattctacatatcaaatgctatcaactgcattgaacttcaagattgccttttcagcctataaagaaagagatccactttataactatgatcctttacctgaagattgggagaaagttcacaaagtttgcaaacttttatcaatatttaatcttgccacgcatgtcatttcagggaccgagtatcctacttccaatctatatcttggtgaagtatggaaggtgaaacaagtacttgatgatgcagctgaggatgaagatctctttatgagagaaatggcagttcctatgagagccaagttcgataaatattggggtgaatgcaatctgttgatggccattgcaagtgttttagatccaaggtgcaaatttcacattattgacatatgttttcctttgatatttaagtctgaagaacttattaatcataatgtgaataaagttcggtcttctttgcatgagttgtacaatgaatatgttaatttgagtgttgaagaatcatttactgatgaagggaatactagtggcagcaacacctcttctaattctgtgtgcaagtctacaattattactggatttgatgaaataattaatatggtgagagagaaagaagctgtcccttcaatgaaatctgaaatggatgtttatcttgaagagggtgtttgtgttactgaaagtgatagcttctcttttaatgccttggagtggtggaagaacaatagtttgaaatataagattttatcaaagattgcagctgatatattagccattccaatctcaactgttgcatcggaggctacttttagtgctggagggagagttatagatgaataccgatcaaagttgaatgaggaatctattgaagctctcatttgtggaggagattggcttcgtcacaaatataacttgaagaagaaaaaggtttaatgtttttgaattttatggtccattcttataattatttaacttatttgatattttttctaataataaaatttatccttgtattgtaggtggatgaaccacttaaagtgatcaatttgaagatttgatgtcttactcttgatgctggtcaatttgaagatttgaaactttatttgatgttttttcagaattaattgagaccttctttttatgtttatgattttgagacttatagttatgaattttaaatttgtggcttgagatcatattttatcatatgaattacttttatgtttatgttcatgagacttttgttatgaattttatttattctggacttttggtttattacttgatttttttagaacaatatcatgtttggtaaataggcttttaggccaggccttgtaaacaggctttcaggccaggccttgtaaacagactcgtaaacaggccttgtaaatagacttttgatcaggccttgtaaacaggctttcaggccaggccaggcttttatacaggccagactcaggcctaaataaatttttttaaacaggtaacagattaggcttaggcttagtcatagtgatgcaggccaggcttaggcccgtcaaagcctggcctggcctggcctacttccacccctacatattaggactgcttctatacatccttcaccttcttctcagggttataaactcaagaaccctaattcttcattgtcccagactaacatcgccctttcctcaggccctgattttcaaaccctgttcgacccatgttttgattgtgtttttaaaagcaacatacttatacaggctggctctacttcgatggttgagtcgttgcttgggtcttgtcgtcacaacccgattcttgtacctacactgaggcttgacaagccaagtaatgtcctttcattgccgcgtaccgcttatgatgctgccaataatgttgacgaacctgaccatgtcatccttctcttcgatgattcttctaccacctcaaactctcctcgctatcaaaaaaatctttcttcaggtatgttctttactgattttcatttgtttgacgtagatatttatggacccgttagtcaatccgtcgaatcgcatgctggttctgttcctcctaccatgtcttctaaattcccatgggtaacccatgaagttttgttggcgtcgtccaaccttcaaacggaagaggttgctgcccttcctattggaaatcaacaaagtattgtcgtgcgccccgctgataagatttgataacccggataggaatctgatttccccaaccgagttccagatgaatattttgaaccacgttcatttggctccttcgcaacttcacccaaatagttgggccttcataaaagctttcgaaaatttttgtcaacatttacaaatcccttgcacagttcctctgttcttttatcattttactgtccacactggtaggataggtaaggaaccccaatagaaaagggttgtctccatccggggtcttagtgaccgaaggctctttcgtgtatataccgactcttttaaaaaattaaaaaaatatattttaaagttgttgtcgaacttgataaacaacattttttcctttgctctgttgaatcccaggatgtggagtccaaatttcccctctattggactcatgctcaccatgaacttcctccctcttcttaccattttgagaaaacagacttgtcggatgctgatgctttttcggttacccgggtagctacatacaaagaggcttaaggccatcccgacattacttcatttattggcacatctcattctgggtttttcgcaccatcgagtatgatcatgtacccttttacataattatttataactgtgttctgactatgccttttatgttgcagtttctgagatggaaaaacaatccgacccctccagccaacccttccaactagctccaatccgacccctccagccagctgcaatccgccccctccaaccagccgaaaataccactaccccttctttccttaaagctttagaaaaggggaaacgtccggcgaccactggtgctgggtctcggaagcgaaagctttcagatgtcgaaaaagacaaggctcgaccgcaaaaggataaggcttcggccgagaaggattagtctgcctagaaagataaggctctagctatttacacggcgtctgattgaccaacctctccccgagtccaagctactgaaactgctccaaacccttcttctactgcaaccaggttactacccggatctctttggaagaagggtatgtccgaagaactcttccatgctatccacgcacccaagcgattaacggacgtcgtgctttactcggatgcctagattcaagagttgagtgttatagagcttaatgttatgaagtgttcttctctggttcagactctggcaaccctcaataggaagtacgttaaatctgtcaatcagtttcagtcatcccgggaggaacttgaagcatcccaagaagaggtccaatcattaatggaacaacttcaaaaatcctgggaagagacttcaagcatccgtgaacagctagaagcatcccgggaagaaacaaacaaggccaaggatgaacttttcaaggctcggattgatgttgcgaagctccagtttaggctggatgatgcacgaacaaatttatgccaacgacaaaattaattttgaaaaatttaaagctttgtcggacaaaaccgaggcaagactaaagtaggctctacttgacctagaatattcgaggcttgatgctgataatgtgagggctgagctatctgcaactgtcgaggggtccttcaacaatttgttggaacagattcattgtttgaatcccgatgttaaatttaacatggacggaatgcacttaagagcttatgtggttggcgacaagctgatctatccaccacctccttctgaagactctgttactcaaatggaagaagatcaagtcggcgaggaggaagaggtgatgcctgccaatgcaattgaaaatcaatctcaaatctgggaagcttaaatgttgaaggaccggaatgtcgggtttattttataatcttttccgtgtttggtccctcgaccctttttaaatgtcaaacattgtcgactctgttatcagttgtttttttttaacatttccgagtattttcccgattttccttaattcaatttgttgcgcattaatttcatttttatagtttttagaattctgtttacatgcatgcgtccatactgtatagaaacgacatcaaccaatcctactagacatggtcacaaatcaacgtcaacaagaaggacaaaatgcaaacccggtagcactggaatatgagattgtttgctaattgaccccggttgtctaagagcgtcgataaccggattgggatcacttgttacaaaaccggtgtgggccaagcgaggtgtcagattacaatgaggcccatcaaaagcccaagaatccaaagatatcaatacgcgcacaacaattttcaaaacaaatcgcaacaaatacctatcctaatctcaaaaataaaggattatatgccatccaattaaaacattaatcttacccaatctccaagtgccaccaattaatctagacttaacatccttataaataatgtacagtcacagtgcacccattgttgggttggcctttcactccaatgctggcctaggcccattgaacgttctagaaccctaaaacaaatccacctccttaaatacctcagttaacggtgcggtagatacacagagcccaactttgacactgacaaattgagagcgtcaagtaacattcttgagagaacattttagcaacttttgtgctttgcaattaagagatctctagaaaaagtttttagtgatacattctagggagtttgatcatcaccattcttgacaggttgtcggctagattttaatttctacagaacagatgggaagatcatgctctaaaatgtctcgtacgatttccaccgtcgacattcctttaagccctgtaccggttgttgcaatgtcgctatctttggcgacataatctttcacttcagcaatgaaggtaaccaggttcaaccagtgtaactttgttttcaccgttaaagtgagagatttcattgccggacatggcgacacgacaccagccagtgtggcgcttaaaggaacgccaatggtggaagccagatgagacattttagaagatgatcttccaatatgttctgtacgatgatgtcatcatcatcctcgaatatgactgaattttcaccaggtagatgaaagtaccatcggtcaacaacagcccatgtcttctgtatatggaacgtaaatattctccaccaaccttcaatgacgtccgtaatctcagcaaccaaactcctgcattctattctaacaatctattaattttatttttactttgtttttttgctttcaatgttagtgtactgttgtttgttttactttttgacgactacgattgacaagcaacataatgtttctgaaactgtttactgtgtgaataggtctctatcaatcgccatattaagtcgatgaagaattccagacatgttatcacaaaagcttgtccaagtacaccataaaaaggttcttggaaatcatgtaccaccctgcgatgagcgaaacactcttttcatcgacggacacttacccttcaaatcgaatatttatgtgattgtgctgaaagaccaagatgaaacacatcacagaaagcctggcaatatggacatgtctttgtaccatctactaaattaacatatcctacataataaaacatcactaacacgagcgatctctagagagctagagtgtagcactccaggtcgtttgatcatcatcattgttaaagtggtccagtgaaccacattcttggtgtatttgattctctgtaacccattaatttatggtggatatatgatttttcagtttttacttcttcatgttaaacaaaccgatcactggtgccgggttatgaaaagttacacagacatactagaaagcaacttcacgtttcctatcattgatctctagagagttagtagtactctaggtagtttgatcatcatcattgttgaagtggtcgagtgaaccacattcttcatgtatttgattctttgtaaccgattaatttatggtggatatttgattttttagtttttacttcttcatgttaaacaaaccggtcattggtgccgggttatggaaagttacatggacatactggaaaaaaattcacgttccgtgatatggggacctcttctaactgtccaaatcaagtaggacccacccatgctcggatatgaacaacgacatttccaattaacaaataacctggtatattcaacaatcctagattcatcatcctttgtttgatggttttatcataaccaaagtaaggcaaaccggtcaccattaccgggttatccaaacgcgcgaatagtgcacaaaaacttcaccttccccatctgtcatgtcatatctagacacgttgtgactgtccaaatcaagtagggcccagggattaacgtatatgtgaagatcccggatcatttagatcaatgaacgtcaaggaaagtagcagatcgacaggccaattgacaaaaatgttgcgcacaaattcaaacacatcatcttaaaacaaaatttaaataaacatttactctcaatttaaatggatttaaaaataacagcaacagatccacaataataatacaaaaacaatactaaacacccattatatgatgtcgatttgtctgactaatgccataaatgacagtctgttcattcaccagtcaggttcacaacctttcacttgactgagcattgcttcgtaaattggtgaagtgcacgaacacaaaacacaaaacacacctacggaagtgtaaaagccacaccatcagaggtgcgctaggaggaaacacaacagacctcagcaactcatccacgaaaaatcacaatcaagcatacgttgtgaaggtcacacgaaagcaacctccattgttcctggtaactttttacagagcacaacaatcttccttacattaaatgaaatcatgaaatgcacaaatttaaattatttatcattgttcaaacaacgatcctttcgtgttgcttacacgttaaaatttactctgtttcattctccgtattttggccatattgacttggttgttttttacactatctttactgctctaaatatttttttcaattgttagcaccaatggatgatagtctactaaatctgaaagatatggctcttgcaatgatgaatattaaaaacaaatccatttacaccgtcaacacaatccatgtgaactaccaggttagaaatttacaatgttaattattcattgtccattatgtaatttgaagttttgatatttttttatgttaatttagccttatgcagagataagcaatagttttgccattagatggaatgattatttggaacatacctgacatctaatagatgctaatggtcaacatcatatggtaagctataacaaaaaccttgaatgacctacaatttttgctggctggacaaccataagagaccattatggactccaaggaaaccatcaaattacgttgatccattacgctcgatctgtgtttttaatcaatgtgtataaaagcatatatgaacctcaagtatttcctaaatggcattcattatataagcaaaacccaaactcggtcgtatttcgccttctcttcactaaatacaaggtcaaatgtagttgccttgtaagttacaacagtttacaattggtattttcttttctttattgggtttttttttttcagttccataaaattctaacaatcaaaataatttttgcaggatcttccaagtgcaatgtactatttcctgaaagataatcagttcacctacatcgaccttgagggaaagacacaatgcaaattagtgttcaatcattggcggaaaaacgtcaaaatcggaagtgggtggagaacttttgccacccataatcaattgaaggtcaactttgaattcattatggagtttccagatcctacacacaacattagccaatcttacaatattgtattttttcatctccaattttacataatgcaataatgtgcatcaagcctatggctaaacttaatcgacattaattttttttggtgtttttaaatttaattcaaccattatgataatcagcttaatttacaaaaatctgcctgagcgaagcgacccgtgcttatgcgcacgggtcaaaaatactagtttctttagtgaaatgtggttggatggataactactaactagattgagctacctctccagtctatgtctgttgactacagtatataatgaaaaccagaagcgaaaaactaattagttttgtattcaggtgtaacaaattttaattatgttttatttttctatttttatagtgtcattttgttaaagttggatggcatcagcaatctataagttgtgaaaaaacaaaaagaaattgttgacaaatatagaagaatcaaaacgagagttaattaaatgaaattgataaagagtctgtttggataagcttctttagaagtatttctaaaagaaaaaaaaatgaaatgagcttttccataagcaaaaataagttttccattagctaatttttagaaactcaccattataatttctctaaaagataagatgacatatataaatgagttaatgaaaaactcattttaatttatggagaagtttatttcatttttttcttcttatttttttattctagaagtgcttctagagaaacttacatccacacagactcaaaataattggatgagaaaagttgtgatagaaactcaattatggtgcagcttacataaaagcaagacactaacatgcacaccataactaaatcaataatgttaattccacatagggtgtgaaattaatatgagtgaaaagaaaaggaaggtataaaaaaaacagataaaaaaagagagaaaacgtaagatcaagatgcgatagagaaagaagagagaggggatgaaaaaaaaaatgtaagagaaagagaatgtgaaaaaaaaaatgtaagagaaagagaatgtgaaaaaaaaaatcaaattaagatactaactaaatatgtacattttttttagaacgttaaaaaaactataaatgaataaatgttaattgttgtaacgttaaaaaaatctataaataaacaaatgttaattgttagaacattaataaaaaatttataaatgcatggaaatgctttttttttttttttttagtttgtattgttggtttcatacccctttttttaccttttgtgcatgtgttccgatataattattcttacatgtctcttctctatcccctgctttgatgtctcattttctctagtttcctcgtgtagtattgactttccagtttccaatcttatgcttcaattccaattccaagttctttcactttgtctagttcaacataaaatgctactataacctatcaatatcactttttcattaatttcccattcaacatctagaacacacttgaaaagcttcttggttagactccacactcttttgcttgcaaagtcttttaaggctttttcattatacattaaactaacttatatattgtaagttgtttaaatatttacacgcgctccgtgaacaagtctacctaattaaattgccttaaacagaagaatactcataatcatgttaaggacgtcagacacatgtaagattaacaaaatgatttttcattaaggttgaagaatcttaaatttaacgcatatatatgggggaggggggattggagaaatatgctatattgatatatagataaataaatatatatacatatataaagaacttttttaatttttatagacaaatgagttcatccatgcatgaaagagtgactgagctcactaacaaactataacaatataagtaaaatgcaatatccctcatgaaaatttgtcacgtacagctaattaattattaataatacataataattattgaaacgacattgttcaaaaagaggtgaaacattcatgttcggatgaatttgagtcatcgcaaggagagtggttgtgtctgccttcataggtagttattaccatacgacaatcttctgagagtcgttcaactcttttcttcaccttacagttgttatgggtacagcggtagtaacttctgcttatatcacacaattcagatatcagttggataagcataaaacattcaaaattagggtaaaatatgaatttactctatgcaaatgtgattaaatttgattttaatttcctaaaaaaagttgtttgttttatttttttaatgatttttaaaacttctgaaaatgattcctattattacttattaataacatgatttacatatagacatgttatgttatatacatataatctcagagtgtagttgttaaagtatatctaaacatatgttttaataacaactaaaaacaaattaaaaaaaagacgtgaaatgcacacaatacaaaagaatatatagcacgtgtgtcattcttttgattataatgtaattagtattttttttattcatagaaattgaatatgatatataataaaatttataatactcatatactttgttcaatcaattgaattaaatctcattgataattatactattgtattatttattgaattatgctacaattgtgaaaaaaaaaaacaatccacaatttgttaagtatctacaatatatttcacgtcaattattctgtatgttttctccttaatgtttaacaataaaaaataaatcattgttaaatattctttgcccagagacacatatacaatataaaaaaaaaaaccgatgtgatatactaatgactgaatgttgcatgtaatgtataatttatttagctagctagtcattttatctagtttatagtttattcaaataatttataagtttatttgattaaaataactgaaaatttaataaacaaacatatcttattaatttcttattatttttccattttcaacctcaatatttgaagaaagtttctcatttattctctcttccaatattatactattcacactaattattttattaaaatattcattttaaaaaaatataagaatttaaaactattaaaataaatgaataaatccaaaattagataaatttataattttgtttacaaataaaaaataatttttataacaaatcataatttgttttatgttattcttcatttattagcaagttgaataactaattttaattataatacatttataattcattagttatatagtttaatgaatttgaaatgctttataaaattagttattcaacttgcaataaatgaagaatagcataaaacaaatgatcgatgttttttcaacttgctaacaaatgttttataaaatcctaggtagatggtttacatatctttcattgagtccttttactatataacccttgatttttcaacaatcttctccttgatttctaattcatcaacgagacacgtcacttcaccaaccttactaattaaccttgctcttgctccccctcataccaggctctattaccttgttgaggagtaagaaggagcacttagaaatgttaatggaataataacaaagactatcaagaaattgaacactacatccatctccacctaaaatcttaaagatattagatatataaatcacatctcttagcttatatatcgcttcactgaaccctttcctataatcagtgttggactaactacacccaaatccaccccggaggagggtgacagaaaataaatgagattggagtttgagtaaggggaatggagcgaaaagggtgactgaaaaaaatggatgattagagttatttatttatttattatttgtgtggatggttagagttttgagacaggagggtgatcgaaaaaaaaaaatttgattttcagataagagagtaagttaaataaagaagagtgaaataaatagggttgattaacttttttttaattaatataatttttttaatgatcaaactgatatgagtatttcttcaaaaaaaaatgatatgagtaaatgattaatttttttgagataagagtaaatgattaaatgttatttgaatatttgtataaaaagattttacattcagagtcatacaccatcttctcggacaagtatttagtatctcctatcatatatttttaattacttatgaagtaataaatatttttgtttttaatgaacgaaatatattatatttatctaaatttatttaattttttcttcgtaatcaatactgttctgaagcacactctaaacaaattcctaaaattatgtgatgtgtttattcacgtagcaatgttatctaaattaactaatagacataaaacaaaatttaaatacataatatgcttttatttttgttatgaacataatgatacaagtattcctttttacgaaatattagcttatcttactttattatttatattttctattaatttcaatatattttttttctttctttaagtttggtactgcattttttggggaagttttcggttgttaaactacacttgttaagattcagacaagtcccactgtcattttttaaacttttcaaacacctggccctttaatgttcctaataagttcctatgttcctgaagtgaccattccaaaaataactttttcattttcctaattccacttcaaagtacatacctttaagtacaattttgtaatgatgtctgcaaccgaagcaaattaaaattaccaccactttcttgcttgggtttgtaataatggatataccactttaacccccattttgctttggttcataaagtataagtccaataaaactatagaactttcttccatgcacgcaacattagcatacacataatatatatatgttttgggtttagtgatctgtttgttgccaccacatttttctttctctaaattattagttaccttcagtctaagtaactttggttttcatcaaatactttgttttatttatcatgtttcctatcctaactcctccttaaagataatttttcccccttaaagataattaatatgctttaagctctcaaaagaaccgattggaaactatattaaggtggtgctacaaattaatatactaactaattgtcattttttacttcattatcgtcacaaatttgttgaaaataggtcgtgttggtatatatgcttaagttatagtttactgaaatttggtttttaaattatacgtgaaaatcatcaaacaagcatatctataggttgacaggttaacattatatgtattgcgtatgaaaaatctgcacatatgcctcttttgatatttgcacttaatgatttttctgtttttttttttccttcaaatttctaccttcaaaccgaatgttcattacttttaaggtagatatgtgcatgcggatttttcattaaatacaaatatctgaagagctaggcatatgcctcttcaatttttcattaaatacaaatatcaaaagaggcatgtgcctcttcaatatttatagtcttttcattaaattttcttcttcaatttctaccttcaaaccgaatgctttcaataaaaataaaagtgtaatgactatgcattgttggtagaaaatgttttatatcatcaactaataaaaaaattgttaatataagttttaaaatagttattataaaatcaacaaatctactatatacatggatttgatgatagtatatgtagcttattcatataaataaaaaaagttatttttttttaaagtagtatttttcttcaactaaattaaaaaaatgcatcattattcctgttatatcttttcgatctctattatctttctctcatctaaacatatcattaatgtgtttagatacatgttggacccactgcacacatgatccaatgctccatttactgtaaagcaagttgctacatgaaagtgtgtttaggacctcatgaattggaagacaaacaagctatatatatatatatatatatatatatatatatatatatatatatatatatatatatctcaataaaattaaaatggtaacagatacttttaattacggccatgtaaaatttttctctattttaaaaatgattaaattttgtaataatgcatgtcttttgactataaacttatcatcataacaaggggtttctttgtcaattattgtaggctaaacgggctggtatcttaatatctggttttgctaattactacatcctaattaaacagtaatgatataaagcattacgtgagtgataaaatgaaatagactagtatgtagggaagtaatgcgattgtgataaaatgatataaagcattctgtgagtgatatcacatatgatggtaaattgtaatatgataattaaggcaaaaaaaagaaggaaaacaactagtgtgaaagaaaccattataacatgaaggtacatttgatgcaaaagagaaaaaaacagcatgggattttcttttggaaaaattaggtaaattttaaagtagttacaatgaaaaactttaggtgcaagtgaggaagcctttttagtgatggataccatgggtggaagaagttggtcagatgaaaatataccatgaccgttggatggtttgggaacaaaggacgaaaaaggggaccctatagtgtacacaattgtcaaaactctaataataataatccactaaatattctctttttacttcccaaaaaaattaatacttttaattacctgaagaaaaagcctatatttcagtctgtaccatcaatcttctctactcccaagtccattgaaagtaacatcttgaatcattccttcagttttagctaagattctctctatctctctctgttgggtgttttcagtctttaattaaaatttgagacaaaatctaggataactacacttggttcatctgtgtgaatttagattcatttggttgttccaccaccgacacatgtatttttcccaaaaaagacatcttaccttcatttctccgggtataatgcctatgatgtacgtagccagtgcactcaatcatagatttaatatgtcaatttgacaatgatattttaaaatgctaaaataaggaagaaaacgcttcattatatgaagaaatatttttttattacatgctaaaataggagtattaattagtgaagttcttaactcacttttgaaattaatcctataatgccacatgaaatttaaagtctcaacaactattttctccagtatttgcgattcttattaaaaacttaaaataagttttacaattgtcttgtaattcttaagaattattaagaattataattatttacataagcaagatcgatttttattcaagaatatatagccacatcaattattctaacaatgaaactgcataaaaactattaagttttgagaacttcataagcaacttgcatcctcttggatgtatgaaatcttcaaatttattcaaagaacttgcaaaacggagcaaaactatataatcaagaaagcaaggggtaatttaaggttcaaggattatatatattaccttgggtgaaggctattcttgacaactttctgaccatacttcctccatttgtaaccatcatcaagcacatccacatcacttcttgtttggaaacaaaaccttggctccctcagcttcctcctcactttcatcttgttcttatctgagcctgcacttctccacctaccatcatatataaacggtaactctccaactaagtgtgtttggaaaacagttgaatctaacacgaaaatattttgctttgaaagtgtaatttttccgatcaatgtggatataaacaatgtatatccaaacatgctctatatattcctcgattaaagagctttttcttaattactttaaagcaagattaattaaccttaagctaaaaacttaatgataaagtaaatatgagaacaaaaaaaaaacaaagagaaaaaaaaggtgatgatctatttgaagaatatgtgaaatctgtgatggactatagtggattcgagtatcaatgagaatcaagacttttgagtaccaagctcttgcatctcctcataccccaagagagagagaataacttggagtacagaagcaaggtcagaaagaaaaaagaagcagtcacttccatatatggtagagagaccttcagattcttcgcagaaacctaaagaatatcttcttgggtatctaaattaaatatttacgtgcatgcagagagagaaagagaaagagagagagagagagagagatattgaaaacagaaagtagtggttgcaaggaggatataccatgagttgttgccgccatcactagtatttctggtgcaattttcatcattgacagctttaggatccagtgttcgcacctgaataaagttcatagtaccatccacatatataagcaaaattgtttcaaaggaaagagatcaaaacaaaataccttaaaattgaaaaggacataaaaacaaaataaatataaataaatacaccaaaagaaataaaactgataattacttatagggttgtagatcatagttgatagttgatattaatgaatagatagatagattgataaatatagatacatagatataaaaaagtaaccacctgttcattattattccaagaagttctggatacaaggtcattttggctgaaaccaactgttgctccggatccggaggtggtggcggtggcggttgtggtagcggtagcgacagcagtattgcttccaccgttgccggggtttagagattgagagagctgagaagattgggattgaacagagggggaaaagaagctaagaacctggttttcttcaaattgaacaaaacccatttcatggatggcttgaggggtgtttgtgaatgaaacttggagctcataattattgggattaacacctctctctcctccttccatacccccttttttattgatgatttgaatttggttttgaaaaaccacaccttgattttggttttttctttggtcttattttctaattgttaactagctggatcttctagttttggcgtagcacaaattctatgccatattgtgaccttagagaatatgaaagagggttattcagaagactgggccactgaggcgtgtagtttggtcaacaacaaggtgtatgtgttgtttgccaattaaattctgaagggaatgtttgtaggaaaataattcctttccccctcttcttaagggagtctattcaaagtcttgtactctctctctctctctctctctctctctctctctctctctctctctctctctctctctctctctctctctctcaattacacgtgcattgtcctacaagtgtttttcatttggaatctatatcaaagagtgccagaagaatgaaactaggtattgtcgtttttaaatgaaaatgattctttcacatcacaccagttttattatactcatcaacgatgtaatttgtttttggtgtacatgcatattgttagtttctttttagacatcatatgtttctttttacaagataattatcttttgaattgaataaaattaatatgaatgaaaattttctttcatcaagtatttaattaattaactatacatctaaattataaacttgagattatttgttaaattaaaataatttcatgcgtttgctatatatatatatattgatagtatctcttttgttttaattcttctatttatcaagaaaaatagatcttgattaatctagagttaaactgaaaggtaagtaaaatttgattaaaaaatatttttactacaaatttaatttgaataatattcaaacaattcaacattaattacaacacattaaatacttgtatccaatcacttagatgatatttgatcatatatattattaattttgttttattattgagtctgtattgcagtaattaattacaaatcccttgactagataatacacttcaaccataattgttgtgcttattaattagtgtggaaatgttatatgggaaattctggattgtaaatatcaattttaatattttcatagaaaaagattgtgtaaagtgtgcaattattttttatctaaaaataactacatataaaaaatagaaaacataatagagttaaaggtgttgaaacgtgtgtttttcttgctctatggattgaaccaactaaataacacacaataaattaataacacaaaacatataaaaatttatcatgatttaatatattaatggctgattggtttaaatgttttgattgatagaaactaatgtaattttaatttgattagcacactcaatcatgaccagttacgtgatcaacttgtactgatcagatgatctataaaacgctaattctgtgatgtagttatcatcgcagtagccaattttggttttaatttaatggtaatgtgtaacacgcaaagttttatgggagatcctatctcattgcttccaaaccgtagtttctaattaatgcaaccattcaaatgagaaaccattttttttttactttgacctcattgttatactttccaacttcatgagtacacaaattggtctatatcttaggcaattattgctgaatttgaattgcattcctaactgataaaattattagtacacgaattattaatggtcctttgagctgagcattattttttgaagtgttctaccaatatatagggacacactcttttttaatagttaagatttattaaaagttgcaaaatcatgaatgaggttaattgaatagcaagatctacacaattttgtaatttctaattaatttcagtaaataattgaaaatgaacaccatgaatgcaaactgtctaggcattcttagaaaaacaagtcacttaggcaaagaccactaacaccttctcgtactgttgattaaggatcagcacataaattccaataaataacatgatataataaaattgattaaggatcagcacataaatgcctagacagtttgctttcatggtgttcatgtttgtttactctttaatttgtttctaacttaccaatatgagactatatatcagctagctcagcttatgtttggattttcagtgagacaaacccgaacatccgttttgagaagtaacatcactcatgcttatgtggtgaagcgatcggattttatgttgccacaagtgcaccagataaacaaatgctttatttgtttgtgacttctagggtacacttagtcatttgagatacaccggaaaatttgccacaaataatactactggcaagatttttgaatgagcaccctcgacaatatcaccttatacaacattaatttgccacaaatcataagaaaatgtctcataaggtagtaaataaagagcattaaatataataatttattattagtggttgagattcaatttgttcaacttatacaacatctatctgtcgtaaaattgatccatttgcaaattgatccaccggcaatatttttaatgagcaccctcgacaatgtcaccttaattaatgagaacacaaaatcaccaacaattaagactcaaaaccatccgttgacctaataagggagataatgtggtgaaagatggtaattaaggaagaaaaagggagtgccaaaagaaaggagagcaaaagaccatatgaataaggatggatggctcaattttagtataaggtggaaggtttgagagctcaacaaaggggagggagatgtacaaaatggaagaggagggaacataagacactacaaaaagaatagcgagtgaccattctctcattaatatcaaattcgctaatcgacaacaaacataaattccttgttatttttttgtcattttcacacaatttgcctcactagataataatataagcctttgtggaactatgacgaaagtgataagatcaagtttgcattagagtcttttgacgaattgagccattagaatgatattaattagcatagtttgcattgaagaatattaacattgtgtgtatctcttaatacatgagaggtttatgttttatgtactatgatcatgttttgtaaggcatataagtgtcaaaaaatttgtacaagtttattttttatgttacataagtttaattttccttgctaaattaaaatcaaagtcactaactgacgatgaacataaattctgttatttcctcaacatttccacacagtttcgctaaataacaatataagcctttgtgggacttccattgtgagtatggttgaccaaaatgaaaagatcaaggttgcattagagtcttttgacgaactcagccattagaacgatattaattaacatagtttgcattgaagaatatttacattgtttgtatatctcttaatgtatgagaatttgttttatgttttatgcactttgatcatattttgtaaggcacataagtgtcaaaaactttgtacaagtttaatctgttttttatgttacatatgtttaattttaagtttttattattatgcataattaactctaatattctcacattctaaattttcaaaatttggtaatataagctgacaaaatgtaatattttctaggatgtacatgttacatgtcttcttggactgaaaagttatacttgtacttgagaaactttgcgttttcattaaatgtttgaaattcaattgttagagtatattaaataaaacaaggaataacatatgcatacacaaaactaataatataagagtaattaaccttagcatccgatcaaaacttggaataaagagcttgtcatgtgataattttggatgaaaaatttaagtgaatatataaataagaatgtaggtttttcattaagcgtgggatgctttatgaatatctttggacacaatttcattatcttagtgttggatactatttcttttgaaagcattgagcggaagtctacttatatatgcacattggacgtaggttcaactaaaacgtatttttgtttctatgtccatagctttataccttatattatacgcattggaaagataacataattaacctgcttagctcatcaacatctatcagttcatcaaagtttaatatatttattatcatcaaaattatgagattttttaaggattaaacatcttctatttctttggttccaatatttctaatatatttacttcaataaaaaggaaaattctaaaataaacacttatacttcaatttttttattattgaaatcaaatataagaatctttaattgttaagaaacatatataaacatttgctgaaatattcacagttaactaaacaaatttgaactatttccagaaattgtgataatacacaagatattattcataattaattttatgaggtgtgaaaaaattgtgataattttttcctaacatttcctttcttttgaattttttaatatatatcaaacattttaatgtaatgatcacatttttcacatcattttccttcttctatacgctctttatacctaagtctatctcaccctttttcacccataaatgtcccattatttgcattttaacctacgtactgtaagagctagaatcctttatgttatatattatgccaatgcctttgtataattatttaattaaacgttgagccattgaaagacagacacacactcagagagagagagagagagagagagagagagagagagagagagaagtattgaatagggttcatactcaataaggaaatcgaacatgtgatagatggataaagccgttaggtttttttcgatttctatgattgcttcattttccaaatcataaggagaactaatgaatagtgtctttagctttattagcacttttatgtgcgaaaaagcttgaattcacacaatgcatggagtgctaaactgaactgcatcattataccttgggaatgtatcgaaatatttttctctttttttctttttgagaaaagtttggtgaataccaaattttattggacacctaaagagaaaaggagaaaaatttaagtatgatagattatatgatgtaataagattaaaaaaaaagtatacattaataacgtgcttgatatataaaaatattaatgtaaaaataaaatatcatcattcaatctgttttctatcttttggtacagcattgacctgtttttcactttattatgctgaattctatgatagaggaagtgtccggagaaccaacccattttcctatattgtgggaaaataaacgcatttagctttgtttcttgaaaggtctcaattttcaatttcctcatatgatgagtcatatacgtacacaattgaactatcaatgtcttttttaccaacactaagaacccaatattgtaattggaaaaccatatccagcatttaccaaacagatccattaatataaccaagatgttataatgttttcttcttatagatagcttaaagggattgctctctccatactctcctaaatatgcaggtcccaaagaaggtgtaaattataatgctacacagtagacgcactatatactcaaaattcgccaaagtattattgaatcagaatttatcaatcataggaaaagctgaaaaggacattttatactaaattaataattaagcacctaatcgcttaaagcattatatctttattcactcattaagtaagcatgatggcgattagatcaattaaattgtttcataaaatgtgtgagaaacagtcataaacaccaattagaatagcatttttacatcatgcaagtaggaggtcaaatttctattatcaaaatttactactttttactgttgcttttcttccctcaatttaatgaagacaaatagtctttcattgactactgtttctttcggtaccaccattttttttcttttagatttaaaagactttttttattaagtttaatatctatacaacgtgagtctaaaaacatgtatactatcaaataataaaaaattattattggtatgattttaaaagcaattacagtattatatatgaaaataagaaacttatcatcaccatattggatagtttgtgattagataagaattattttaaaaaattatattaccaatacatatattattcactcttttatttcataagaaaagatttcatttatatcttttttaaattgatgtatgccctctatagtatttgaagcattgtttacagctattagactttcagtcaattaaacataagaaaattagcaacccttgatttcctttatttatttatttatttattttcaaaaacaaattgaatgttactaaaaaaaaaaaaaaggatgggatcaatagcacaagatatactagaacccaaaatataatactccaaaagcaatatcacgttgtacttcccctaattgaaaatgcaaaagaaagtgtcacgtgaaataataacccctttgaccccgattcaatgcaaccttgaccctctgactataaagaccagcattatatgtcaacattatgtgctacaggggttaatcaaagggctggcttacgagaactcataaataaattaaaatattatttttttaaaaaaaattacagatttactgtagtttcaaagttatttacatatttatagcaacgagtcgcgcccccaccaggcacaacaggggtcaagtcgcgccctcaccatgtgcgacttattccgtcgctatttcggtcgctaacacttttagcgactaaaatagagacccaaattagtgattaaattttagcaaccaatgttttttttaaaaaaaaaaaaaagattcgtgccacgtggttatttttttgttgactactctgcccccatttggtaaataaagaaaaaaaaaaatgtccctattgggaaaaaaagtcgtactaatgctatttttgaatgtcatacttcaaatggtctaactatttttgtattataaacttcgaacggtcataattttttatagaaatgtccaatggagacgtactttatgtcaaaatgctcgaaattaagagaagtaattaaaaataggaaatagcattaaattaaataatttaataattaaaaaatagacaaaaagaaaatttttggatgattgaatcctaaatcctaaatttgaggcacttagaggcatcttttggaaaaatagttgaccaaattgaacatttctatcaaaagttatgaccaaattgaatcctaaatcctaaatccccttcgacaatttttttaggcctccctctctcaatttcgagcgttttgacacaaactacgtcccaattggacatttctatcaaaagttatgatcgttcaaagtttatataaattgcgtctcaaaatgacacgtgtctcaaaatgacacgtgtcacaaccaggtgagtcgcgtctggtgggggcgcgacttgacccctattgtgcctggtgggacgcaactggtcttgtcctgctgggacgcgactcgttgctatagatgtgtaaataactttgaattattttttaaaagcaatattttaattttttttcccactcataatatatacatcaaatacccaataacaggactgataaatcgaatcaattccaacataatataattaaagatattcaatttaataattgatttattcaacttgattatgaatcaaataaaaagaatttgagtttaaaattgaactcattaaataaataaattgaacttagattatatataattcaacttgattaatttatgaatcagtttgatatatataaatttatgtatttatatctaaatttatctatttatcaatttatttatacattaaatattttatattattgacttactataattattttatatagttaatttaatatatatatatatatatatatatattttatgaaatgaataaagaaaagtatgtaggataattataaattttaaataaatttttatagtaatatattttatatcattaaattgatataattaattttttgattaattgtattttatattgattttatttttacataaaataaataaataaaaatatgtaaaataattataattttaaattaagtcgaactaaattaagtcaattttgagtttgaatcatgttaaatttgaattaaaaataaaaattcatattaaattcaaagcaaattttgaactgaatcattttttcttatcgagtgttgaatataattccaactcattttccgtcaacatcaacattaacaacattaacattaatgtcaacaacatatttaatccaagttaattgaggtcggtggtagatgaatcaaatgatagatcgaaaataaaataaataaagagaaatggagatgagaagaaaaattgaaaataagacaaaagagatgaaaaataagctaaaataaaagaagggtgaaaagaggaggacaaaaaggaagagaaaaagaactaaaaaaagagaacgactgaaacataaaaatactaatgagtttaatcctccagcaaatttatagtttttctccattccgtcctaagacataccgttcgccaatttatatctcattttattaggtcttgtttaactattttttttcctatgtaaatttcaatcgacatctaccgttctttatgtcgagctcttaataataaactattatccttaggggagtatttagttttcgtctcaacgtgtctaatcgtacccgaaaatctcaattctgtttcatatagaaattgcataaatttttggtaacagctaacaatacaatattaattatctatgatggctaatatttgcatttttattgtgtctttttcttgttgtcaactaaactcttacatatattaaatatgttaatttagtgtgtgtgtgtattaaatgaaaaggaacaaagacagatcgacttggaaacttagatggaagtctaaagataaataagtggtggtggggcacataaaaaccaacatagatgtaaaaaatgtctgacagtttgaagaaagaatgaagaaactaaaaaacacaggctttcaaatccttgccaaatcatattccaatacgtacacatgtgtccactcggagaccacccttctctgaaaaaaaaggaaaggaaacactaattataacccctccacaccatttttttctctactactatcatccttcccttcttctccacttgctctctcatcagttacttcatctacagtttgtctctctctctttgaaaagaccctcccaactaaatatccacaattaatataggtttctacttcacaattctctctctttttttctatttttttgccctttcctttatataacattttatgttgttcttctgactcatagaatcctcagcagaaaggggattgtatccaaaaagtgaagtagatttttcattcagatctccttgcctagcctggcttttaatattgaaaacgaaatgttcttgtttagttcccctttttgtttgcttaacaatttatgtacaaaaagataatatatataatataatacttatatcttacttccataaatactgattcactccttctataggaataaattatctcatcattttgtgatgcgtgtaaaatgttgtctcctctctcttttttttttttattattgtcattcataaagattgagacttaaaatctttgaagtaaattatgaatgaaatcacgcagggttattttagattaattagagacttttaatttaagttcttttagagggagagttttacctaccaaatgattttatcttattttaataaattattagtttaaattaaggtaaaattttgccagcataatggtagttatataggttatttttagtttaagttcttttagagggagagctttaccctacaaaatgattttatcttattttaataaattattagtttaaattctcttaaaggtaaagttttgtcacaataatacatacaggctatatagattgtgttttacaagttattttaattaatttttattagttgaaaagtttgtttgattatttattaaataattttttaaagtagtttttaacaattttttaaaatgctatttgaagtaacattttttaaaatattaatttctatttcctaactttgtattttattctctttttatccttaaaatatttttttaattttttattgtattttttaaatatattattttatatttttcagttattttaactattaattttaatcaaacacttatgatttaatacactagcttaaaatcttataatttttaactaattttatcaaacataaccataatgtctatcaaaatatttaagtttcatttacttaaaaaaaatctcaactattttattttatttaataaaccaaaccatctcaattttcattaagctagctaactctccaatttcgtatgagaattttcacattttaaatatggttaattggttatggaaaaaaatcaagatttacggtattaaaatagacagagacgaaatcaattatttattttacattcagccgaataactgaaaacgaaaaacaaattaataagtattaagatctacctattcctcagtttgacacacaaaaaaatccaacttttcctctctttaaaataaaatttcctaccgggagagaaaaatctgaaaaaatattagaaacaagcatcttcgaaaagttgataaagatctgttttaaaatgacattcatctaaatagtggtctcagcaatccctttctgtatatgtgttatcatggatgagtttaatagcatcctttatccccaaggaatatataatatgaagatcttacatgtatgatgtaattggtcggtccaagcatatcaattttctttatccatattgtatagatatataaaaactattcagtcttcgccacgtatcaaacagtcggatagtttatattttatagtttttaaatttattttattttattttaaaaaattaactattttgttctagaattttttttctctctcattgtttttttactaaaaaaatgtatattgcaagagatctacttttcttgaccttttcggttaatgtcagtaaatacggtgataataccacacataagatgaaatattattattattattattattattattattatttataaagaggaattcctgacattaaatttcatcacgaacgtttgattactctaattccacgtatgctaaaaatagtttccaactaagttaacatgtttcagtgtgaagtaggctagcagtttttcaaaagcaacctaaatacaacaactaagaaggatagataattgagtttttatgacaacaaaagagtagaattccaatttaatttgcatatctttgagctgaggtggccttgatagccctccaattggtttgtgatgattaaaattgaaagagaatgttaggatgtctttagatttacagtgagatagttttaaaaatatgtttgagagtaaaattagtttgatcatacttggttacctcttaaaataatatatttaagagtaaatttttgtattgaaattcaatttgagagaagtaattaagacttagcttgaaaaccttttacaaactcaatttggaaacttaaatctaatctaaactaaagttttcaaactttaatctaaatatgcatgcatttagttgttaagtagaaaatgaaaaagaaacatgttgtcactaaatagtgaaatttggtgaacaatgggacatgcatgtcatgtgtgggaagggacttaattaacgttgtgaaataaaagaagaatatagataaaaaaagcaaattatatattaaccgatttctattgattgaattggtagtgattgcataatttaggaatgctaactctctggcacaccttgtgttaagatgggttccaattattaacacaattagtattttagtgcagtaataaaaaaatagtattttagtatttgcaatacacaagataaaatgtctattttatattactaaaatttataaaaaaaataaataatttcaaataataaattatattataattaaaatttataaaaaaaatattataaataagactgataatattttttattttaaatgtaaaataaatcatatatattgtgatataatattattttcaattattggtaattttaaaaaaatgaatttcaatttataaataaaattgtataaatatttcattttttataatttggatcattgagatttgaacatatgaccatatgaattctatcccaaccttaaccactagagtgactagatcaaccttaatggattgaaataaaaaaaaaaaattatattccattattttatttcatagttataaatattgaaataatttatattaggttattattagaattaaataaataattaaaagatagatcattgtacacaatgtattgactttcaaatagtttagtggaaatatagttctaatgattttaattattctttatttcatatttttagtaaaaatataacttacacatgtataaaaaaaagtaattttaagttttactcccaataaaagtattaaatttaatttatctattaatataaatatattttttcttgcttattatcttatgacttaataatttatgaaatgttttattttatctaacacataaaatatcagtaaaacataggggtgttcacgggtacgggtcatccatgaatccgaactaatccaaactgatccgaacagtttgagttgggtcatttatatatttgggtcaaaaccgaatcgaaccgatcaaaatcgatcatgtacgggtttggtcacgagtttatatttattgatctgttgacccattgacccgatccgtgaacccgtaataataatataaattttattatatatatacatacatatatatatatatatattaaaaatttaaaattaattttttttctccgcatagtttagcatatggcccaattaatttgtctcttttgcaaaagaattaatagaaacaacattttatttgttactgaatttggacagaattatgaataattttaggcagtagcagtgtagcacaacaaatttttaatagataaataatatacttaaattttggttttttaaaataaacaatattaagcctaactcattcaaaaactgattcagcaatatgtactagaacatcccttttctcgttctagtagcaattcaactaattctagtacattggcttcaaacatggtctcacaacataatgttgacaaaggagataaatatgatgattgggatgatgaattagaataaaaatcaagaaaaaacaggatggggtgcaaaaaaatgagttagataggtatttggaggatgatgttgaagatgatcaccctgagtttgacattttgaattggtgaaaattgaagacatctaaatattatattttttcctgtatggctagagatatattggtcatttctgtagatactgtatcatctgagtctgcatttagtacaagggtagaattctggattcatttcgtagttccttgagtcctattactattgaagctctcatttgtgcccaatttttacttagatctactaagtaaaatgttaatgacttgcaagttgaaataaatgaagcataaaagattgaatcagttatgtaatcccttatttcattttttatatttgtataaaatatcaattaatttttgtgctaacggaattgtgtttaaatttttagagttgtttggtttggctttaaatattgctaatattgggtctccaagtgttgaaactacaagtgctagaacttcttaatgtattactttcaggtatattgttatttgtttcacctttttttttcatattttgtttaccgtgtttataatattaatgaatcatattttgttcgtttgtttgtttcaacaaatctggttacaacaaatttggttatagcaaaacttaatttgtaagaaatagtcgtgattcagactattatagtaaatcttgttaaaaaatgttttgttttaatttatattataagtctattttagaatattatgttgatggtattaaatgaattaattttactatactttcatacatttgataatattgtgttaattgtattgaatatttgaaagaatcatgatataaaatagtagttctaagaaaaaaatttaaatgggtaacccgttaaaccgaaccgaacccatgaacaggttgggttgggttgagtttcaattttttttttgaaaaccgaacggaatcgaatcgatcaaatttgattgggttgagtcctaaatttagtcaaaaccgatccaaaccgacccgcgaacacccctagtaaaacaaataaatactacgtttatgtaaatactgttgtgattttttatattttaaatatattataaaaatatggttattttatttaggttaaaaattactacccttcaatttattatgtatggctatgccaaggtcaaatgttatgcttatatattaatcatgttatgattttacatatttcaaacacattatcatcaaatattgcttaatttttcatttcaataaagacaattacattcacgataaaaaaaaaaataccggctagttggataataaaagaatccaaataaaaattcacaattttttgcaactatttatgtatgtttttacacttaaatgatattgggcaaatgtgtccaaattatttataagcttcaattttattatatatgtttatacacatgcctttaatgtattatttttgttgtggtcttgcctattttaaacatactcttagtaaatgtgtccaaattaggataatgtccaaattatctagctactcaatttctcttaaaaaaaaaatactcaatataagaaaaagggggatttttttggcaaaattgtttctgttacactcctcggtcagtcttaattaagataatatccttagtcttagtataatatccttttatcttatgaatattgtttactgcatagtttataaaaggagaaaataggttatatgctaataacaaattatgacaagtatgttaatttttataataattattttaaaaattataacaatgatgtatttatgattgattaacaatataaaattatatacactcagttcatgcagccattaaactaaaataaattgtgcaatttttttcctcaagcgtaaaaggcatccaaagcatcgtacaggagcaaaaagaagcctaattattttagcacccccaatcactatccaaagcatcacaacattattatattaaggtctatttatctttttggtccctatattgttgaaacaaattttttcttttagttcttatagtttaaaacatcacatttgatccttggagttgaatttttttaatccttttggtcaattccatcaagttttgactagaaccatttgaagaaacatgaacaaaaataagaaaaatgacgaagcaagcttaggtgcaactgaacatcatcaaatttcgtataaagttatttatgtttctacaaactgacattatctgtgagaaccaaaaaaaattataaaaacaatgcaaaactaaaaaggaaagttattactttctctatctctacttataagacaatttaatttgtatctcttaagaaaaataattaattatattaaatgtatcgattatttatattattatttccaaattattatttgtttatctctttattcaattaattgtttcttattaatgattggagaaaaataattaagtaaaagtatgtaagaaaaataataattaatgtatctaaaaattagaaaataaacttataattaaagaaaaaaagagtataactataaaaaaagtaattaaaccttatattaataagaaccaaaacgaaaacatggatgggagaacataattaaacaaatccatgaaaggaaaaagctaaacaaatctatagaatgaaagactaatccatgctctctctttattcaatttgtgtcattgttaatggaggaggaacttcttagagtatctttgaaaggtgggagaattatataatattagttgtagggaatagaaatttgaaaattaatcggtggggtgccccccactattcaaacgtggatcaatccctatgtccaaatgaaaggaagtttgatagaccaaggatcaaacatttgacatcattgacatattagaatctaaaagagtgtattcttccctatttgaaggaaaaaaaaactactgttattgatgtagttacaacgtaaactcggccatcttgtatgaacaaactcaaaacatattttgccttgaaggaggagaaaataagaaagaaaggacacctagggacccgacatattggtgatgtttaaatacaaagttcaaaagtgcaataaaaaatactctgtaaacagggatacgatgtgaagcaatatggtagtgtgaaagaaagaaggaggcagtgatcatgaggaagcaaacaagagtagtatgtgaatgtgctgaattccatgcagcaattatggctccccaatcaatttccatagtcttccaaaatctcatgatggtggagtgaataatcagatatttgatgggtccccatgtctctcaaacctcttttaaaatcttcaaataaaatattaaaaaacttctctttatactactacgtttcacaacaacggtggttcttgaaagctttcaaaggaatgtgtttgctgcaggtgtaacttagcaatctacaccgaactagtttgctctagtgcatctagatgatgcacgatatgttattaatttattaaccatttaaccatcgttcttgtgttcacaatttttagaccgctaaactttattttatgttttcaattgctatcagtaaggatttctttgacagtatatcaaagtggccctttcatgataaatttagtaaaaatattttttaaaaaataagtaataactattaatgatgaaaaagtgtaatgccatgccatcagtaagaatatacttatttctaatacgcctacttatttagtctttctccttagtagcccttgggtttcacagatataaaaaaactttctttctaggaaaaaaaaaacagttaaaaaccactttttttataaaaaaaaaaaaataaatggattgttataaattttctttgagtttaatttctatatattattgtgtaaaaaaaaattatacagtcaaccaaataaaaaatcatactaagtatgacattttttaaaaatattataaaaaacaatcaacttacaatacatatcaattggtaattaaataataattaactttttgtatactatatgttagtacataaactatttatttcttttctttttatgttaataattctgctttgtctctatgaaattcttgtactcttaaattaattacttttaagtttatttttatataattagagtatttttttcagaataatgcaccaagtacactttcgatctttttaggaaatgcaccaacagttgttggttcaagtaataagaatcttttccccaaattaaataaagttatttcgaattaagtattgtgaccgaagaaaataagtgcatttaaagaattttttgtcccctgaaattatctattaatttgacttaaatttgttgggattcaatttggtctccgggcaagaatattagacccataaaacataatttttaatccttcttacagaaaaatacttttaaaaaaaaatataagtttttcattaaatcatgcatcaacacaagtgagtgttgatacctaacttttaagctaatacttgaaggattatgaactaaaatcacataaaaaactgtcagatctacccttttataggccaatcttattagcccaacttatagtactatattaatgatcttttgaacaattagaaataggaataatttgtttggttgtccttaaaaaaggaatgacaaatgctagtttgaagccaatataatctagatttggcatctttttttatttatttatttatttacaaatttggtgtaaaaatcctctattacatgcgtttacataaaatgtttcataccacatgcaaatatgtcatgtgcctcttatcctttagcctagtataatggtttccaacacaccaattgcattacctctcccctaaaaaggtgggatcaaaacaattaagggcaaaacctctagtttaaataggcatgattagtttcgttcacgtcacttgatacacatggttaaagctcactaggacttaaaaatgagcaattatgtatgttatttttataattttaactattttttcttatcttttggtgtatatatatttaaaaaaaaaaaacaaaattgattaattatacatttttttttataattttatataatcacttaaatattctttcatttttgtaacttaaatttaaaaatatctatgtgtaatctaagaaatatttgcttgtaatacacgtgttaataaaaaggataaaacggaagataatgaaaatataattaaaaaagtaaaatctatctactgcatttactgtgtaaaactttaaatcaaacaaaaagtcaacgaacacaagtagccttttactttttgaattgtgttgcacacatgcaccaacttttttgcttattctaataatacggttttacattggctttttctatcagcagtttgatttggtctcagacaatctttccttcattcgctgggtctcatctgaatcactgcactctttgggtgcatggaagaacataattctcgaacacacaggttagaaataatttatttaaaagatagtactaaaatactaaagtgttggagtatttttaaataaatccttcaattaagacaaacccggtaacacagttttcatcattcttagccaaaaactcaaaaaatgctggagcctataaaatactaaaaaaatgaaaatgccaaaaaaaaaaaagcaaaaacaaaacccggaaaaatgaaaacatgcaatttaacagatcacattgaaacttaaacttgaatatagactcaggctttggattgaagctgttgcgaaatcggcaagtatacagttcgttaaagtaataaaatgataagtgagttatcgtcccacagagattgatgcaccaattgtattataacttcgatctataagttggatgaataaatatttggtgaaagtatggtttgtttgttgagtaaatgaaagtaaagtaaaggcaagattaaaacataaagataaattatgagcaaacaagtaagttgtgacaatgtaaaggacgcgtagccagggcacccacactcgatggttccttccaatgaacgcgtattgttcactatatttgattatctaagtcactcagcggttgtgttcgtcgcaatcggttactcatcgattccttaatgaaataactcttgaacccacttgaaagttttaatcccttagtcaccttcctagggttaagcattaagcaacactagaacaagctacaagcatacatttctatccctagataatgtaaagcaagtcactacacttagttacaagactagaaccccaatattcctattgtgaaccctagttcttaactcttaactagattgattaagtccaagaaagagatagacaacattcaagcaaagtgtagtgaaataacttttgataaatgaataatagcattcaatacattccaatggaagtttacatcaagtgtttggccctagctacaaaatgggactagccaaacctaatcatggctggccttgatacataaaaaagaaacatgtccagctgaagcatatagaagagaagatggagaagggtctccacttgagtcttcaactcccaagccctagccaagctttccaagctctcttagaaccctttcttagtgattttcgtccagaagaagtgtcttcaacactgtgggtttgagtatttatatgggggtaagtgaaagtccaagtctaccctccatcagcttttaaaattacacagatggtgaacttccacgctgatagcgcggagttcacattggtggcgcggacaggcagaagctatggcgccagtggcgtgagattcacgctggtggcgccatgtggattgccttatttccttcattagtggcgcttgtggcgcggatctcacgctggtaacgtgagatggcagggaggttggcgccggtggtgccacattcgtgctagaggcgtgacatggtagcaacaattggccatttctcttcagttttggcgttggtggcgccaactacatgctgatggcgtgaattgacagagagaatggcgctgaaggcatggcattcatgctggtagcatggaattccttgctataaaccttcaattctccagctagcgcggatagcgtggattcggcgctggtggcgccacagcttttctcaaacttccttggttgatgtgtgttcctcctacaaagatgctcaatttagctgagaatagggtagcaaaggaataatcaaagattatagcattcatgaacaattattgacgaattatgattaattccttgcttctattcgcttggaaaacattatatgctatgagcatatcagaagctaagtcacaaatagaaccaagatagttagagttagagaggatgtattggaggatatatctcttattaattaataggttagaaacaagttgaagagtgtgaaagtaaaaggcacaaagtccaaagtattaaaaagtgtttttagacaaacaaatcactcaattaaaagttatccctactaactcacgttaaattctaatatattacaatatttttaaagtaacagtaagagaggtggatatcaatatatagttatatttatatatttgttttctcttttatcatgtatagtcactagttttcatctcatttctttgcttatctctttcttcttttcctatcatatttgttactttctctttctttaattttttttattcatatcacttttttccctccacctaaatataaaccccaaatggggtgtgcattaatcactgctcaaacaagagggagaggtgagtgatcatcattgagtgaattgaaaagtgaattgcatgaactgaatttctggaataaagtttataccgcaatacatatgatcagtgttaattaattgttaacaacccttaacagtttcaattctaacaacctgctggcatcaactaatcattgcaacttatccctttacacttttgtatcaatagaacttggcaaaacactgcttctatttattcttattatacatgtcatggaaaaacctctccaatgaaaatgaatttagtttatattttctttgattaatttcctacatgcattaatgctttcaagtttcaatcatcttgctaatattcttcagtatcattgttgtatcctattgcttctaacatggctaccttgatgattacggatacgtggttttctattgcactgtaattattgtaagatttaatgtctcatgtgaaagatatgtgacttattaagaattaataaataaataaataattattatggactaagttataaatgaatcgtgagtttaagtgcaacaatctctaaagacaattgttatttaacgagaatagtaattataaagaggttaatacttattaacgtgaattcaattataaaatcttatttatctcatctttcaaggaatcaaagaacactaaagagaagtctcactatggaaaaaaatacacactatttatttattatttatgagaatcatatattccaatatcctggttggtttttaaattgtttcttttaggataaatttttaaaatgtataagattattaattttcagaaaactaaaatttaaaacagttggatgttggactactgtttttgtatcaattattcatgttttctctcttcataccatatctcacttttaaacaacccaaagttcacacagacacagtattcatttatttacactatttctgtacttcccattgatttccaattcttcatattctcttacttacaccttttcaccttctctttattcttcgttatactctttcgatcatactttgtatattggtttaatacttcgtccctgtaatgtgtacccgtgcgtcacccaacgatataactggtggttagacctgtatattagaaatataaaattacaacaacaaataaattattgtaaagtatattaatttttttaaagttaatatattattaaaatagatattaaagtcatcccaataaaatataatcattacaatgaaaataaaactaacagtattatataaaaatattgcatttatttatttctattcccaatttttttattttacaaaatatatatatatatatatataattcttttattaataaacttacatatttacatatgaacattaatgcataaaatacaatttttaaaaaaaaaataatcaacaaatttagttaatttagcacaaatcatttaatgtatataaaaatatgtttttaattttttgtagcacatattttgtgaattaattatacgtgattatgctttttctactatttatgtttaaaaataattaataattaattaatttaataaaaatatattgataataggaaaaaaaattaaattgtcgtccaattacatgttaactaatgttaaaatctttatattttcatgtttaattcacaaaatatattgataatatactgataatagaaaaatgagtttaattcacaaaatatattgataatagaaaaatgagtttaattcacaaaatatgttgataatagaaaaatgagtttaattcacttgattaatttttctattgtaatagtattttagcatgagaaatacacaatataaatattttttttcttaaatatgtttttcctcctcattgaaaaatgtttttataaaatacagaatttttgaaatattgtttttgatcctatagcattaacaacgttacactctcattgttaggggtgttaaaaaacatttgtaaattgttgtatcaaaaaaattaaaaatcaagtagttttttatttttagatcttattatcaaaaccgaaacaaactatatattacaactatattgattttattgaatgaatgtttaacatttttttttgttgttaatgaatattattataaagactaaaagtctaggaaaagaagtcttagataaatcagctctaaattcataaacattatatatattatggtgcaaatattgtaaaattatttgttattaacaaacaaatgaagcaacaaaagcaaacaaaacggagcctaaaatcatataatgctaaaagaatttgctaagatacaaacaggatagattatcatttatggaaattactttgcatgtaaagtaagttcaacttacagcaagactatcaaccatcaactgtgttgcctttaatatatgcatctcatcattccatagtataatcctgcaaatgaactacataaattaaaatcaagcaaaacaatctcggtatgagaacaagctttatcaagggttccagttacaacaacactacaacagccatttctatatacattacctaacaacaagtagcatttgaacagatattatgacttttaaaaaaaatgtgacattataaactataatattctagatatatcaattatgacaaagattaaattatgaaatacaacaaatggaattgtgaaatcaagcagttagaagcaagacttcattgataagtaaacacgctgtctctttgatagccctgtctattgcaatgggtaccacattgtaataaaaaaattgtaactcagtcatatagattcaaacaagaagaacaatatagtgagggcaccatacctctgtatctgtattggaagctataaacacaagaaataggaatcagttatgttttaaaatagtatgtcattaagcttagaaatgttacaataaagagaaacaagttttgggttccaaacctggctaatagaaataggagctaaggcaggagttgagcagaggaaagttgattatacaatcccagatgtgtaaacttttcatcttccaccaatgacatttctctccaacaataacagaaacgataataataacgaatatcccaaatcataatcatctttaccgatgttggggggaaaatcgagagcaagaaaggaaggtcggtaatttatatataatgaatcctttgggtttcaatctgtatgtatgaataagaagattcatattacaataatttttttagttttagttcctgtaaattgacttttttctaatttttgtccctataagatatttttctcatttgtaatatgtgtaagtttgtatttttccaattttggtcttatgtaagattataactttttcatttttggtccaggtaaaattaaaaaaaaggagactaaaaatgaacaaaatatctttcagggataaaaattgaaaaggtataaacttataaggattaaaattagaaaaatgaatttataggaaccaaaagtaaaaaaacactaacttagagggacaaaaatatatttaagccacaaaaggatataccttgaccaactcagcaaaagtaatgaggattccccagggatgaggacggttaacaattatgcgttctaacaagactctagttatctcttcttggataacttcctgctaggtcaaaacatgtatatcccagtcaaatatatactatccagaccatataaaacataattggaaacacaagtttattagaagcacaaaacaggcttgacttgaatttgtttgatttaaagctaaagagaaaaacatgccacgagtttagatataccaggtttgattctgcaaacaagtgcataaggaggatggaaaagtagtgtgtattggtattaggataacgcagttggttggcaatagcatttaggaaaaggtagcgtccttcagtgtccaagtccacaattagtgtctggaaaatattcaatgcagcaccaacagaaaatacggctaatgggaaagcctttgctgatgtttgtgtatgggaagttcgttcctgaatctgatggattgcctataccaaaacataaaaaattgttaagagtaattagtaacaactactacttatagttagtcccagttcagctactaatttgttacttggttgtcattacaatggtcttttctagtctaaaatggtaattaccagttacaaatagtttggataaatatctttctgtagtgtttttaaacaatggcacaaaatcacaatttcatacatcagaacttctctgttttctggttgtttttttatttctctgatccatcttatgctttccagtattttctctcattttctatctggttttcacaagcttataaaaaacagtaagaaattactcttgaaggatggtagctagacataaactcaacacaaatcttcaatgttgaatcattctcctaatgaaagttgttggcccatgacacatttactaatataaatactataaaaaaacaacttttttatgcattatctagaattgttacacaagtctacatattaaaaaatattaagaagaaaggatatgattccaatcaatcaagatttgcagtattacgctccaacatggttaagaataacttcagtaattttgaaactccgtgtggttattgagtcatttgcattaatgcggagacaaatattaaaagttttcaatttaaagtacctgcattcctacatatagcacaagcgaattaattaacggcacattgtatcgagtcccagcagaggctgcttcattaggtgagagaagcagcttatccttcagttcagataaaaatggcgaactctgttgcgttgtctacagaaaatttgattgaacacttgtaaaaaatatgagaaagtaaaagaaaatgaatatagaaataaataagctaagcaagacaatatgcagcagtgactgagaacaaaataaattatagtgaacaattacagaaataaaaaaaaaaaaaatcttcagcaaaaagaattcacaaattatatattagcaaaaaatgaaacaaacataatcaatctactgaattatattagcaaaccatgaattaataataacaaaccaattcaaagagggatgggggcagaccttaaggtatttatctacatcggcctttatctgctttgctttaagtgctgcatcaacctccgaaagaatgctcggcgattgggttatttctggaagcaaatcaatcttcgtacagaagaacaagccagtcacatcaactatgtcaacttaatgctccttaatcttaaacaaacttttaaagcgacatatgagattctaagaccttcaaattaggagtagatgggtctggcagcctcatactacgcggaaatgcacttagaatgatattcctcatctgtatgtgatttggaggaataacatcacaaaaggtaaagtgatagtcacacagaaactcagggaagtcgtgaagtagaactaagagcaccctaagtgtgcctttatagaggacacgaacctggtcataaaaaaatttacaaaaaaaatgtagatgtaagaagcattattgtgcatagacccagttggaagcaaataattgaggccgagatatagacaaaccggatctccaagttcagcatgcctaagaaaaggctccataaattggaacagatctacaagcaacctttggatataaggccaaccttttttaccattaccagtcaacatttttggcatgaagctcctgtgactaatcaactcaagccatgcaaaactgaagaaacatttccacaaaggaaccgagttttaagacaatatcaaacaaagcaagtattaaaaatggatatatatgataaaaaataatgtgtagactttacagacaaagaattgttaagaaagagccattaggttcaatttattactgaaaaaaataatcaaacgaacttaataaaagatactcactccaaacaatgataaatggcctcaggacaattacatacataaccattccaatatagtaggcaagtgggagcaaaatacttaatggactttattatacaaatacaggtaacaaagtactgcattttgtatttatctcatataggtacaaagaaaatgcgttatcaacttattattgcgcatcatataacataaacacaaaagtttcaaattctattatcacaattcctagataatagccaccataaccataaccaaaaccacttgaaagcatgctaaagaagaactctaactaagatctctctacaaggacatcaagcaaaagatacatggatttagcaaggaaagatccaacaaagtaaactagaagcaaatgatccctaatcaacaatattttcatgtttccaccaataagaattggaattcttaatgaatccagcaacatacttaaaccacagtacagcaaactatgaatcataagtagacaaacctaacctgaatgcaggaactttaagcggctgcaaaacatgaaatgcattggcaaaagcagtcaaaatctgcaatacatgaagttgtattagtaaaacacacatgcctgtaatattaacttattgggcaatgttgttaaaacgtagtgtcaatgcagaaacagtgggggtgagcaaaaacgtaaaaacgtgaaacgtaaacgaaacgtaagagtttactacataccatagttatcaatagcggccggagcggccgctatagcggcggagcggagcggagcggcgtggcaccgccacggtggggtctgtagcggtgcggtttgggattgcgggtggagcgggcgcgacttcggatccacggagcagccgcgattgcggagggagcggccgcgacgcctttttctctgacctagggcaaagtcgcacgtcatttttaagctctgtgcacttcttcttcacttcttcaaacctccatttgtgactgtgacctcctctgtgcactccgacgtcgactccgactccgacgttgccttctccggcaaccaggtcttccttctacggcggccctttcttctccttgaggttctgttttcttctcattcttcttctccgttctgtgttttcttctcctccttcatttccgttcatttttcttcttggtgacctctgttttcttcttctcctccttcatttccaactttccgtcgaggccagttgctgtaacaagaaggaagatgaggcactgcagcaactgttggggaagaaggaagaaaatatgcttatatatgtatagggattaggtttttcttttgggcctgatttgcttcctgcacctcctttattgcttaatgcactctgctggctactttttttagttatatttctatttttcatcttatatatttatattataaattttttaatacatatataaaaacatgagaatagcggtcatcccgctaccgctatcccgctatcccagttttgagggcagccgctccgctccgctatccgggattgataactatgctacatacacaaaaataaataaatatccaatatatatataactaaaacacaccaatacacaagttatcacaaatttaggtccaaacattaaggaaatacaataagttcaaatttagtcatcattaaataagtaaagtgtattaataataaaaaagactgtaaatagaaactatctaaattaaaacttaaaagtctatttcaaaaatgtaatatgaaactgtagaaggaaaaaaggtggttacaaaaagcaaatgaggcccaaataaggaaaacaagaaaacctagcctatattgatacggagaagcaaagcatacgaaagaactcatcagccgtcggtgggtactggctcctagaactctctctctcgtagcaccatcaccacccccatgtctcaccctttctttcataaatatgcgtctctgcaacatgttcaccactgccaccaccttattcttcacatcaacctcatcatcttcttcaatcagttggaaactcactaagaaagaactacaacaagcggcggtggaggagcaacgcggcggaggagcagcgacagcgatggcggaagagcagcgacggcgacgacagaggagcagcaacaacgcggcggaggagcagcgatcacaacggcgaaggagcagcgtcggtatttaattttttttgttttttttaaaaaaactgagtcaactcggtaaactcgccgagtcaaccgagtttactgagttgactcgtcgtttcaaactgtttgccccaaaaaccgtttcaaggtgagttttgacacgattttgaagtgcaaaaacgtagaatcggccgttttaaccgtttgaaacggcgttttaacaacactgttattggatgcttggaggggattgaaatgcattggcaaaagcaatcaaaatcaacacaaacaaaataaccagcttaatcgccaggtgattactggtcaatcataaacacatctactgataaaattcgacagtttcaaactcacaaaacaagtatcacattgtttctgggtattaacaagttgaaccgttgtttgtactcaataattaaacaaataaaaatactattgaagaaagaactgaaagtgacaaacacctgcagatttgcaccatcagtaacaggctcaagcgaaccaagatctagaagccagttgatgaataatctgaaaagtggcgttggattaaacaaggccttcttctcctctgcgtcttttataatgaatcggacagtaaccgccataatctgccatgaagcaatgggaaacattagaccacaattatatataattaataaagcacaaaagaaagaaagggggggggggagagagagagagagagagagagagagagagagagaatgcattcaaattttagtttattacacaccttagaaagaagaacaagtgtgtttgatccctgttccaaaaaccaattaaacagataagatgctaaagctacccaaaagaaaataagagaaacgaaaaagatatacatctgaaaaccaaaaccttcaagattgagaagacaagctttgcataaatatcaattgcaagaaatgacattgttggcggttgagattgcggtgaccccaaattaatcacctcagtggataagcaacgtgcaatagctagttcctggagaaaaaagcaaggttagatcgacaatcctggtcatcagtagaaaagagtaaccggcatgaagaaagaaatgccaccatcaattgtcggaaaaagtgatctgtaacatcatcccctttaagcagcccattctgatgcaattgtaagatgaagtgggctgaagctgtatcattggcaccaggaaattcgcatatcatgtaccattctgtaaacaacatggcaacctacaatatatgcataataaatattcaacttcaactatcattctgaaactatattgttacatacccagcattcagagcaagattgttcttataatagtcataagtcataactttcaagtatcttccatgttttctttcatgactctatcaatttagcaacaattccatattatctcgacaagcatgtagtatgaaacacatctgtatcagattttagggtttccaaattttagtttttaacagtacaaagtttggcaacagaccaaaattcagaaattactggttctaaatacaactcttgagcccaagtggagacagtgaatttttcaattatttttgcatcataacttcacaaaaaatagaactctcacccattgtattcattctcctattcccaaagcttatacatcttacaaaaacacacaaaaagaaataatcatacttctaagagcaatttaaggtgtaatcagctcaaaatcttccatattcatatacaagaagtattctactcagtcaaacctcagttactgctggaggaaatgaatcttggattacattagaatcaaaagtggcataaggcatcaaaaattaaacttttatttacagtcaaattataaagcagatatgatagatatccaacacaatttgtgcccaaaagccatgcaacaaaattcaaacttatatatcaatttcaagttcaagatacctgcttgcagaacccagaaggatctggttcagcagaatctacccctttgaactcttccgtgtttgcattaaaaaatgtagaactgaaaccttctcgatacttccttctcaaaaagagttgttgagtaatctctgtatcaatggtatttattgcctgtaaaatagtagatagcatgaaaggcaacaagccagtaagtattggattgaacagattaagacttaccaagaaaaactagcattattattattcataaccaatgtttatcaccgtaaattaaaaatcagaagagaaatggcagttttagccacccatgttaaccaattgttttactaaagttaaaagtcattgatcaaaacttcaaggatacaccaaaaaaatctataaaattaaaaatcacataatacaagatgtattgtcaggattaaagatggaaagaaagccattatctacacaaatatacattgatactgcccctctttttgtttactcttcatatttttgcagccttgcaattctttttagtttagtacatcttcattctcattcaaaaaagaaaaaggacaaaataatttgacctatggagatgctttttactcaatcccctttttgtttcaccagagttaattataatgcagaaagcatttcaaacactgatcaaataatcacatacaagaaaggaaaaaatttgattgttacgaacccaatttttttacagaggcgaccaattggtagttcattgtatccttattatatacttcagtaattaaaacaacaattggtagttcaatatatattatggtgcaaatactgtaaaattatttgttattaccaaataaaagaagcaacaaaagcacaacatcttcttcactaccacaaataactataaccacaaacacatttaacagctaaccttatcagcggcagcctgttcaatgactgcaaatcctagatcaatattatcattggtgacaagttgcatagctagttccaaaatttcattagcaatatttaggttttgaaatgaattcctcatttgactatatattgatgcccttaatggttcctagaagaaatagagatacattagacagaagaaaataaaacaaaacggagcctaaaatcatataatgctaaaagaatttgctgagatacaaacaaacaagatagattatcatttatgaaaattactttgcatgtaacacgagcccaactcctagcaagactagcaaccatcaactgtgctacctttaatatacgcgtctcatcagattccatagcataatcctgcaaaatcaaaatcaagcaaaacaaactgggtatgagaacaagttttattaagggttccaattacaacaagaatataacagtcatttctatatatattacctaacaacaagcagcagttgaacaaatattatgacattttaaaaaaatgtgacaatataaactataatattctagatatatcaatcgtagcaaagattaaattaggaaatacaacaaatgaaattgtgaaatcaaacagttagaagcaagacttcaatgataagtaaacctttaaaacaagctccatggttgtttttgttgccatgataacagctctctgaacaaaaatactagacgctgtctctttgatagccttgtctattgcaatgggtaccacactgtaataaaaaaaatagtaactcagtcatatagattcaaacaagaagaagaacaatatagttagagcaccatacctctgaaaatgcatttgcaacccaaaaccactgagtttttcattgataataacacgagtcccaatattaggtatctgtattggaagctataaacacaagaagtaggaatcagttatgcttaaaaatagtatgccattatacttagaaatggtacaataaagagaaaaagttttgggttccaaacctgactaaaagaaataggagctgaggcaggagttgcttgtaacagtacttgagcagatgaaagttgatcagacaatcccagaggtgtaaacttttcattttccaccaatgctcccaaggaaatatgaagaggaccagcatactatcaacccataaacatgcaaagaaataatatataagttatcaaaaaagaggtcagtggagcccaaaagtatgtaagaacatacctgagacagtacatgtggatgagcccccgtattggatgggttggtgactacaagtggtaattcagcttgttttactagaggtacagggccacattttatatcagtaatcatttttgattgagatgccccaacatcttaattagagaaatcaggatttccttccatttctctttttctatccttcaggagggaagttggtgtgacatccatcatatctacactaagattttttaacaaaacctgtatagcacaagatttcaacaaataggtggatgagagacaaaattaagccaatgacactccagcaaggaaaaaaaactgacctctatgtcaaacatgaggttcattgtcaggtttggcattgaataaatctcagcaagcaatcccaaaatggccctagtccaaggattagaaggttcatatgcaagactgctttggcatgatttgaggacctttgacataaaattgaatgaaaatgtagcacactatagaatataactagaaaaaaataatcacaattattgggaaacacccaagtcccacatcgactagagataaggtcaatatagagtatataagtgaggggcaaccctcatcctttgagctagcttttggggttgaattaggctcaaacccacattctaagaacaatcatagattgtacctttgacataaatggaataacagcaatcattagccccttctcatatgcctagaccatggaaaacaatttgataagtaaatgatcacttgaaatatcatctgctcctgaaattaaataaattgggaatcacctctatcatcaaagactttgggtctatttcacgagccttcaaaacctgattccgcccaattgttaactttccaagccagctgcccaaatttttaagcaaagagcgttcctctgaacttgattttatgagctctgatcctaaaagaacctgcagaatttgcaaaaaaccatgtattatttcaaagacaaatgttcacttcaatcaagcagggaacagaaataaggctcaaaccttgcaattttcataagttgcctggacaatctctttgttcaaagccttggaattaactttatccaggaatttcaggtacaagtcatgcaaatttggctcaatgcttgctctaaagacaagtatcaattggtataataagtggaaataaatggaggtaccaaagagagtacaaaatatttgagctgtattgtagtatgtgctgaaaaataaagggagatgaaaaaaaaagatttagtatactggcacaaaaaacatgaaacgtcgtccatctctaattccacaagcaactcgcttcagatcctgagttttaatgacttcctattctctgtcagcttctatcattgagttctatcttaaaattcaatctagagagaaatgacaacatattaacgatgggtttttgtttcatctaacagtcctccttatttccatgttgaagctcggtcaacaaattcggtaactcttggttcagtatattttgtatggcaatttgagtacaatgaaaatatctaagatagggggtttagatagtaatatggccattactaaggtagttagtatatcaaggacttgattgaagagtgagatgagagagagtgttagagagagagacagtgggtgggtgagagtaaaccacagacataggtttagggggaagtctaggaatagcccacgtcccaatttcgtaggacaagggtatcgtcaacgggattcggtggcaacggagacaaggagaggggctgatgataggaggaattggagggacgcggcagatgtcacgtccttctacttcactcgtttccccgacgacatgagagaaagagagctatggtccgtattcaaaagatggggtgatgtgcgggaaatcttcattcctaaacagaggaacaagagcggaaggaaatacggttttgtgcgttttaaaggggtcagagacgtccacaagcttgctggtgtgctggataacctggttgtggggggccttaaactccacgtcaaccttcccaaacacaaaagatctcggacgcagaggtttatggccgtgaacgaaacgtccaacagaaggatgaaggaggacaacaagaaagtcaaccacaaaggaaaagagaaggttgacggcgacgaagcgggtacttcaggtgccaagaatgaccaacagaacggtcagccatcttatgctcaggcccttcgaacgggctggtataggcaatcttggcggagggcgcatgcagaagctacaccatctatatcgaccgtgcagctaacaataccggaggaggaatgggcatggtgccgagaggcctgggtaggtagactgagcaacctatcggcgttcgatagaattgaagaagaattgctgtgggacggaggtgaggacatcagacccaaatatatgggagacgatatggtcctcctcatggggctgagcgactccaaagcagcagaaatgtcgaaggaagcgaacgagaaaggggcgtcgctgttcaactcgttggaaaaatggagcccaaacttaaggttgggcttcaggttggtctgggttgtatgctggggaattccaatgcatgcatggaggaaggaacacattagcgccgttgttgcagggatcggagaggtggtggagttagatgacgacacggacgaactccaccgcctagacagggctcgggtgctcataaaaacaccatggcaacccacaatcaaccacaaggtcgtggcccacattaatgggtcagtttacaacattaacattacggaagagacgtgctcgaactcgtgtaaatgcttcagggatcgatattcttcttcggaggtggagcttcaatcagaggagagctcaatcggctttgacggggaagacccaccggagatcagtttcgtggcggaaaccccgatggtacagtcggcgacgaaggcggttccggatacggatggccacagcggaaaaacgtgcactttacccacgggtccaagcaacccgcgcgtaccggcggtccatcagcttagctctgacagagagcatagcccccaggcagatgtcgccctcaagactgatgggggtacgcacagtgcaaacgaagtcaggagcctggagagcagccaccacgacctcgagcaggcagaaggcatgccagtgacgcctcaggccggaaatatcacgcttttgggtgagagaggaaagctggttgggaatttgggagcagagaatgccttttgcaacaaagaggtgagggacacacctctgcaggaaagcagaaaacagctggtatcagatggtgacaaggacgcaaaggtcaacacaattaaccaagtgggttctggaagtagcagcagggacgcaagcattttcaaacaattgggccataaggcagttgggcccaacttgcttagaaaccaaagtgacactccttggagggtatattccagaagcagggggtgtaaaaagcaatctgagcccagcagagaggtagaaaaaaatcaagggcttgaagcaggccagctttcggggactggaaatgcagcaaagtatcaacaaccacctgcgtccccaattatggaacgaggcagtggcttaaaagatattgttggatgggggggccggccaatgcattccgacgagaagttagaagcagatggtagttcggtgaaggaagcatggacatcagatatagaggctgaatgggcattggcaaaagcacttggtgtatcttgccacaatcaggacgtcatgatgaaggcactatcagaattggaagacagagatgtggctgaggctacgaggatgggaaatagccaacacaatcaatgaagataatttcatataacataagggggttgggtgggggggtaaagtgggctgcaatcagaaaattggtggtcaaggagaaggtggacttggtgtgcctgcaggagactaaaaaagattatattgatgtcaagatttgtcaagcactatggggcgattcggaggtgaaatgggaattttcaccagcaaataatagagctggaggactcctgtgtatatggagtgaggaggtcttcaaagtagattccaaggtccaaggggctggttttattcttttggaaggagtgtgggtttcagatggctctagagttgtcatagtgaacgtgtattcatcttgtgaggcttcgttaaaaaggaaattgtgggaggacataaggcaattgaaaaatacacatgcgggaggtttatggtgtatactggatgactttaacagcataagaagaccacatgaaaggttggggatttgcctgagagctcaggatggtgggttgctgagggaatttaatgagtggattgcagatttggagattgatgacgtcccctgcgttggcagaaagttcacctggtataggcccaatgggactgccaaaagcagacttgatagagttctcgtctcagctgcatggtttgataaatggccggactcaacccagtacatattggacagaaacttctcagatcactgtcctattttactgagatcatcacaggtggactggggtccaaaaccattcagggtgctggactgctggtttcaggataaatccttcaagaaagtggtgcgcgaatgctggaattcaagcatgatcagtgggtgggggggatttgctctaaaagagaagctcaaagttctgaagcagaaattgaaagactggaatagttctcactttggcaacattcaacagaagctgaagcacattgaggaggaccttaatagactagagactgatgctgatgacagaaatctgtctgatgaagaggcaaaaaagaggaaattactgcaggaggaattgtgggtgaccgctctgtccaatgcctcactattaaggcaaaaagctagaaacagatggctaaaggaaggggactgtaactcaagatttttccatttgattgttaattggaaacgtaggaaaaacatgctgagagttgtgatggtcaatggttgttggacagaggaacctagtagggtgaaggagcatgctgtctccttcttcaagagcagatttgatgagccgcatctggacaggcccaacctagatggggtggatttcaggactgtcgaacagcaccataacgaggctttggtggcaaggtttgaagcaggggaggtcagagaagctgtatgggcctgtggaagtgagaagagtcctgggccagatggacttaacttcaagttcattaaagaattctgggagattatcaagccagactttcttcgctttttggacgaattctttgttaatggtaggttcccgagggggggcaatgcatcttttattgcgttgattcctaagggtcaggatccacagggtcttaatgactatcgacctatatccctcattggctgtacatataaaattgtggcaaaggtgctgtctaatagactgaaaaaggttctgccccaccttattgaccatagacaatctgcgttcatcgaagggagacatctattgcacagtgcgctcattgcaaacgaagttgtggatgaggctagaaggaaaaacagaagctgcctcacatttaaagtcgattatgagaaggcgtatgattcggtcagttgggagtttctgttttatatgctcaagcggatgggcttttgttcaagatggattgcgtggattgaaggctgcttaaaatctgcaacagtgtctgtacttattaatggcagcccaacggaggagttcattccgcatcgggggctcagacaaggagatccgttagccccctttctgttcaacatagttgctgagggccttaccggtttgatgagagaagcacaacgcaagaacctgttcgttggctacaaggctggaaacaaacaggtggacatcagcattctacaatacgctgatgacaccatattttttggggaagcaacggtagaaaatgttaaaacaatcaaggttatgctgagatgttttgagctggtgtcggggctgaaaatcaattttgccaagagcagattcgtgactttcggcatggatgaaacatggacagccaatgctgcttctttcctaaactgcagtgtcatgtctttacccttttcctacttgggcatcccaatcagggctaatcctagacgaagtgagacatgggatcctttaattaggaagtgtgagcggaaactagcgagctggaaacacaaacatttatcctttgggggaagggtgacactgatcaaatcagttctaaattccattcccattttcatgttttcttttttcagggcaccgaagaaggtcattgctagactggagaggattcaaaagagatttctgtggggtgggaatgctgatcaaaaaaagatggcctggataaggtgggacgtggtgtgccaagcaagagagtgcggtggtttaggtattagggatttaacctcattcaatcatgcattacttcgaaagtggctttggaatatgttccaccagcattctgatttgtgggtccaggtgctggactccaaatatggtggatggaggagtttggcaggatctgggagatctggtagggagtcaatatggtggagagacctcagcttagcctgcaatatgaatgggctgctgagtgggatatcttggcgggtgggttgtggttcaaaggtgctattttgggaagatggatggaggaacgagggtgtatcacttatggagaagtatcctagattataccttgtatccaatcagcggcagaacttcatccagcaaatgggttccataacacattcaggttgggaatggcaactcacatggcgaagacctttcatggaaggggaggttcaactggctattcaatttctacaagacgtacaggagcacaatcctcaagatcatcagcaagatgtgtggaattggcaggctgaatcgagcggtcaattttcagtaggtagcgcatattggcattttaagagggctggggtagtaatggagcaggatgacactttccaagacatgtggaaagtcaaagcacccagtaaagtactttgctttgcttggagattgttaagggacaggcttcctacgaggatgaatctacaaaggagaagtatagaactcaatgatacactatgcccgttctgcagcaacagcaacgaggaggctgcacacctattctttggctgtgagcgtatcaggatgctttggtgggaatccatgtcgtgggcaaatattttgggcgtcttttctgatattccgagacaacacttcacacaatttggcttcttccagaaaattggaatcacttcacatagatggttattatggtggctggctttgacatggaacatttggtggcatagaaacagaattgtcttccacaatgaaagctttaaccacattaaagtgatggaagctgcattgttctcttgctggtcctggattaaaaatggggagcccagttttgacaactccttccacttttggtctagtaacttaagagaggcttttgtaactggggggggtatactacttagattcccttgttttaggggtaatatacatcccgtccagatttttggcactctaattcatgtattttcatgtattagactgccatagatccgttatgggctgttcgtattttttgtaatagtactacttgtactatgttttcacccacatatatataaatatattatctttgctgatcaaaaaaaaaaaaaaaacaatgaaaatatctaagaattcaacataattcataaagcaagaatacaacgtgattttataccctaatcctaattatcctcgggttaaaaatccagtaaagcaggacttaaaacagatccaaaaccaaattttttactttctaaaatctgtttaagtaccctgcactttttagttctctatttaccccaacagtccatttaaagttccctgctgcatttaatcaccatgaaaccccaagtatagtcactatcttcaatcttcacggtacatatacccttgcacatatatctacgtggatgcaactttttaaagcaattacatgatacatgatgtaacttataaatcatgctaaccttttcataaccatatattgtgcaaaccaaggatagtactgctctttcaaaatttcagtgaactcttttgctttagaatcaatgttagcaacaaaaatattattaatcataaatgatatcttgtcctgaacctttgaccctggagcctgttaacatcataaaaaagcaggtgaaagaaatccaaatttagatttgtctaagaaattaaagtaaaattgggagcggatgaaaaatgaaacacttgaaaactattttgtaagaaaatatgtaaaatcattgagaatctaaacaactgatcaaatccatcaacaaaactcaagaaagcagccaatctgataaatttattgtaaaaggctagagcacctcaataggagtttctcttttctcagcagcagcaaccaaagtttcgatgttcgaggcagatgcaaaccctacataagatgcacagatcaaaggaacacaatgtatcttcagaaattaaaggcagaaataaaggctagtatttgtggctttatgctaatcaacacaggtaagagaaatatactggttgaagtagctccacgggaatgacaaacaaatccacaagacgaaagcattgaggaggtgctgactgtgctatgtaactgcaattgtaacaacaaaattaatatgagcaagagcgcaataaaataaagcatgggaaactgagaaattgcagagtaaagacctgagagcaatctattatagatatatgcagcctctccaactcctcagaattttgtctagaggcaaccaagtcagtatgagatttaagaacctgtagtcggaaaacgtcagataggacagtaaaaatgaaaatcaaatgaggccagggcaggctgataaacaaaatattaatgtagaaccttcaaaaaggtagcagttgtctcaacacagagactcagaacagcatcagactgatgaaaagattttccagaaaggttctgtgatccaccaaaatgggcatcctttaagaacctgaggcactcctgcaaagcctaaatatgtcaccacttctcttctacaaaaaactagggagtacaaattaaaatgcacgagaccaaaaggctgcataaatctgtaatgttaatttcttaaaaaattagaaaccaaggcataagggaaggcattattacctcaaaaaagacatccttgtatgtggttaagttgctactcaaccacttctcaaggtcaaggaattcttttcttaatgcaaaagctgctaaccttatactataataagagggaataatttccaccacggatgatagaatctgtaaaacaaacatgaaacaagagttaaaaatgggaaaagataatagcaaagacaaagggattggcatttgtgaagacaaatttgaaggctaattgcaaggtaactaaaagggctcaatgaaggtgagagctgcatatgttaacaaattttagattcaaacaagaaaaactatgataactgacagtgaaatctatctatcaggaaaatgaccaaaatgaaaaatacacactttacaagagaacaacctttagctcctggcagatgtccacaattcttataatgctgtctgcatcattgttttgagaattgataaaccctctcaagaccagattggggttaacatgccaaagctgtagaatgatcccactgcctgcaggactttttactatcatgggaaacacaatcagagatacttcccgttgcaagaggttgtaggcagtctgcaagaacaacaaatgctacatatatcaagaaaaagacatgaaatgggatgctgtggagaaccaacaaatatgaatccattatattgtacatttatatgtgccatcccaagaagcaagacttcaggacagtgtttaaggggataatcaaggatcgatcgaacaatgctggcgtgaaccttctcagctagctggcagaggacatctaaaaggtcaagacacagccatgcatgatttgcatgtccattttgatgcttgtggcaattaactgcatcaacataagcctgcacagaaatttgttgtcataaaattttggagatggaaaccagcagcagcaaatgtgcagaaataacatcatactagctgtcttcctgagcgtgcaaaggtaaacatttctggtagtgctgatacagcatatttaaggaaagacagttgaccctcagtgttcttccaaacggatccacatatggcatggagaggaaaaggttcctggtagatgcattttcagaattttatgccagagttttcatgtcaatcaattaagctccaggaaaaggatatgtaaagttcagatattataccttacaggcatgtttgtatactgacatgagaaaaaataatgcttcttcactaggaaggaaaaacccttcatggtcaagattttctataacgcatatccaattggtttgtggtgcctgtatcagaaaaaaaaaaacatttactttaatttattctaattccagtgactggaataaaagcctataacaacatgaaacttcaagttttattgaagaaaactcactagttgcttgactgtatctatcaagacatcaatattccaagagttcagaagcggaaactcagactcattgtatccatgggctgcacgaaatgttaagtatgcgttctgattgtcctccagcccagtattactataagcaatagcactaagcaatttagatagcgtattattggttaaaggtaagaagagcgagaatatctccttgcaccgtgagacatcaaccgtgcatccatagcctagttccttcacgatacctcccatgttaatttccttctgtatgtctgctaaaatagcatcaaaatcattttctccactgtcatggaacaactccatattcctgtaaagagacagggaaagctactaagcaggcatgcaattaaacattatgaattaattaattactattactaactaataatatacaacaaacatacaattatattcaaaagtggatgcatgttttattttaccaacatgataaattcaattaatgattaaaagggtttatactaaccacttagtcaggggttaaatcaaataagtttcaatatccgggactgaatgatgagtggttaacttaataaaatggtaatcagtcagtgatctgtgattaacataacttttgaccacaattgtatcacccatacaatacaataaggataactaaataagttacaaccttaaaaaatcagcctcgttcatctcatccggaagcaatcgagtcaagaaaaaaggtggtgtatctttgaattggacaagtgacaatatctgcataaaggaatccacgtgcttggaaagaccctcagacagctttaggaacatgataatattgtgaatttgctcatggcaactcaaagaactagggttggcacacaattcctcaatccgagctatgcagaaaattttgcctaacacaaggaatatttcaggtcaaatatataataataataaataacacaggaaaatattgacacagatcatgaaactaacattgcgaaaagatataaaacattatttgtcaagtaaaatgtatgtaggaaaaacaataagaactgaaatagaaattaacttcataattaccacacagcctggcatcaggattctcagaatcagataaagcaagaccgatgacaattttttccaatgaagataactgcaatctgttacaaaaactttctaaaaagcattcattaatttctatattcttcattgactcagaaaacactgtactaaagtttagtttgtccaagaggtgcttaatgactgccccaagaattggctcatgctgcatgtctttcatatctcttctgacatagtcatagtgatccaagcaagtttgaagcagcaaaatgcatccagcggttccaatttccgtgaactgtcagcagaagaacgaacacatcaataaccaatccaatcagagtgacaatacaaagaagattccaaatatgaatcaattaaaaataaagagcaacctgaagcaaatctattaagatctctgccgaaaccaataaatgcctagtattagaaattagggtaattcaaaaggtagcaaaacacaaaaacagagcactgaacaagacaggatatgaacaaagatgcaattccataaagcatggagaaaagtaataataatagcatagaactttccataggatgtgtggcataaataaatcatggtgaaatgtgtcatatatatactcaaatactcatattatgaaccaccagaaaaagaaaaaaataaagattatcagtacagctaaatcacctacagcttaatcttctacaaaggcaaaacctcatcagttaataatttcataatcataacccaattcactagaacacagtagtgagcaatgtttttccccaaaaaaacagaatttttttatcgacaaatgttaattgttagttttcgtgacctttccctcattcccttcattcttaagcacccaaccaaccttatatctcccattgaaaaagccagattgattcttcatgtcacaggaagacaagataacaatacctcaattccctcctaaaacaatacctaatgtgtatctttccgtttacaaaccctaaaaaaatccaaaaaagcattcccgcatggtggcaaaattaaaagcattattgaacactcaagcatgcgtgcatgtcaagtcaattcaaaactcgaaaccaaaagataggggtcaaggaagaactttatcaagcacgcagcacaaacaagaaattcgaaagaaacccagaaataaattaagtgtgaaaaagaaagatgggggagtgagtgaatgaatgaatgacctgagagagttgacggaaaacggagtcaaagttgacttcattcaaagaactgaggagtaagcgaatctggttggaggagaagttggccatggtggtgggcgaggaattaggaagaacaagagtcattgaaaggaataaaatcacaaagatagaacaaaagagcagaaattatgattaagagaaagagaggagtgggcaacgatacttgtttattcaatcaattttagataatatatagaaattaaaattgatcattaactatctctaaaaattcaaataaattataatatacttgaatcattcatatgtgcagacaacataaagttaggctaattttttaaaataatacaaattaaataaataattggaaaaagggggtagtttgaacaaaaattagtaaaatggggtggtgaaacacgcccatctggggcgtgtttaaacacgcccagatgggacgtgtttcaccagatggcgccacgtggcaggctgaaacagtgtcctagggtttttgcgatgttttcgtaaattacagaaggtcgtaacttttgactgggacgtccgattgacgcgaaactggtggtcacgcgcttgaaattgagaggagaaggtctgggcaagttcccaaagggtttatgttttagtgtttcagattttggattttgggtatcgaatttagggtttatgatctagggtttagggtttagggtttcagatttaggttgatggatttcagattaggttaggggtttacgttgtgaatggggttttagattttggattttgggtatcgaatttagggtttaggatctagggtttagggtttagggtttcagatttaggttgatggatttcagattaggttaggggtttacgttgtgattagggtttcagattttggattttgggtatcgaatttagggtttaggatctagggtttagggtttcagatttaggttgatggatttcagattaggttaggggtttacgttgtgaatggggttttagattttggattttgggtatcgaatttagggtttaggatctagggtttagggtttagggtttcagatttaggttgatggatttcagattaggttaggggtttacgttgtgattagggtttcagattttggattttgggtatcgaatttagggtttaggatctagggtttagggtttagggtttcagatttaggttgatggatttcagttgaggttatgagtttatgttgtgattagggtttcagattttggattttgggtatcgaatttagggtttaggatctagggtttagggtttcagatttaggttgatggatttcagattaggttaggggtttattgcgctgggaacagacctaaggtttagggtttaggtccgatgttgtgattagggtttaggtcgtcggttacagacttaggggacttagggtgtatggattccagtctagggtttaggtctaatgtttcgatcagtgtatagagcttgggttacagacctagggtttatagattctggtttagggttaggtttgatgttgtgattggggtttagttcttcggttacagacttaggggttatggatctcggtttagggtttatgccagtgaataacttaatgagtgttacatacacttcactaatattgagtaattagttttccaattcaagttttgccttggcaagcacttccttagctgcaattgtctttgattttatctcttaactttgcttctgttttctcagctctttccttgagggtggggttttgggtttacgatttagggtgtaggatttagggtttaggatttaggatttaataaaccctacatcctaaacaataagccctacaccctaaataatcaacctttaaccctaaaccctacaccatacaccctaaatagtccatcctaaaccataaaccctagatcctaaaccttaaatctgaaaccctaaaccataaaccctagatcctaaaccctaaattcgatacccaaaatccaaaatctgaaactctaatcacaacgtgaacccctaaccaaatctgaaatccatcaacctaaatctgaaaccctaaaccctaaaccctagatcctaaatcctaaattcgatacccaaaatccaaaatctgaaaccctaatcacaacgtaaacccctaacctcaactgaaatccatcaacctaaatctgaaaccctaaaccctagatcctaaaccctaaattcgatacccaaaatccaaaatctgaaaccctaatcaaaacgtaaacccctaacctaatctgaaatccatcaacctaaatctgaaaccctaaaccctaaaccctagatcctaaaccctaaattcgatacccaaaatccaaaatctgaaaccctaatcacaacgtaaacccctaacctcaactgaaatccatcaacctaaatctgaaaccctaaaccctagatcctaaaccctaaattcgatacccaaaatccaaaatctgaaaccctaatcacaacgtaaacccctaacctaatctgaaatccatcaacctaaatctgaaaccctaaactctaaaccctagatcctaaaccctaaattcgatacccaaaatccaaaatctgaaaccctaatcacaacgtaaacccctaacctcaactgaaatccatcaacctaaatctgaaaccctaaaccctagatcctaaaccctaaattcgatacccaaaatccaaaatctgaaaccccaatcacaacgtaaacccctaacctaatctgaaatccatcaacctaaatctgaaaccctaaaccctaaaccctagatcctaaaccctaaattcgatacccaaaatccaaaatctgaaaccctaaaatataaaccctttgggaacttgcccaggccttctcctctcaattttgagcgcgtggccaccaatttcgcgtcaatcgaacgtcccagtcaaaagttacgaccttccgtaaattacgaaaacatcgcgaaaaccctaggacactgtttcagcctgccatgtggcgccatccggtgaaacacgccccatctgggcgtgtttaaacacgccccagatgggcgtgtttcaccactccattttgctaatttttgttgaaactacccccttttccaattatttatttaatttgtattattttaaaaaattagcccataaagttatgtcagataagataaaatcatgatagataaagtaaatactaataattactaattgaatttaaataaattatctaatatcatagtaaagataagataaagacatgacatgatatgtatggtaaatcttaatatctattaattgaatttaaataaattatctaatatgaaagttaagattatgggtggtcttgatggaatcagtaataggtcggacacgttgtagcttgtcattgttgttcggatgaaagttcaacggaatagtgtgcgagttgccggcactactagaaataggccttttaatgacacgcaatcgacgacggttctttcataaccgtctttgtatgtggggcggtggcatttttgcaattaaagtgaactttacaatgacggtttttaaaaacccgtcatggatcgtcattttatttgtaatttcaaataaaaaattaaaattaactcaacaccaatacaaaaacgggcctttcatttttgccctagccccttctctttcacaccggcagtcactccctctctacatctctttctctcgccgtgtctcacgaccgctctctcacagccgaaagactgcgtctttagtggaagctctctcactctcagttaaggtacgaatcctgtctcacccttgaaccctctctaccatgcgaaaaactgatttttatttactttctctgattctatttcgttcttcaatgataccaatttcctgcttaattagtttctactaattattggtagctctcgagtttctgcttcccctgtttctggtttgtgtatttgtttgttcacatgttctctgctagtttcccgatttgtgtgacttcaattgaactgcgtgttggtttaattttcctggttacagctgttgtgtctgacctgtattcctctatttattccctctatcatttcttggtggcatttggtttgtctttattagttagaacctagaagtaattgttttgatagaaggcttgtcttgtgtttggtaggttagaacctataataatggaggtataatgtttatttatagtatgtgttttataatgagttcatatcaatattaaaatatttaaaatttgttttttattaattcttataatttgttttattaaaacatatagttaaaattaatttttattaattcttatacatggacataaaggaatataaaatggagtgagtagttaagaagaaggaagtagtgataatgatgatggtgtggatgtggttatcttgggtaagttaatccagtggggaagagtgtgtgtgttttgtttcacaaatgaattgagtgagaaggagacaaaactctcatatggccgtcatgcttgaaagaaatgttgtgtgcaacaagaaatgcttgaaagaaatgttgtgtgcatttgtctagtgaggtaatgtttaggccttagaccttctttattcatagtcttttatttgtctgatacattaagctggttatggtttattatttttgaggcttttgcctttgaagtttatacttcctttaatcttgttagttgttcatagcataaggaattttacactgtagtttttggtgtcatcaccttgttacatactgagctgttgattctttaatcatttaaggtgtggatttcaagataaaggtttttatagttggtggtaaaacattgaagcttactatttgggatacaggtaactatgttatagtttttttttatcacaatttcttttttgctttgctgaagaattttgttatatgtatgcatgtagttaagtattttcctatttctaactcaattgtctgttcatctgggaaaattgttatatgtatgcatgtagttacttcaatggtgttaaacaaatggttgatttaatttttgactgtaactcattcttacaaatccgcagcttgaaaggactgagtccaattagttcaaatcttttgaacaatacacttcacatacttaatacaaatctagtatagtccacacccactcctattggacctgctcttcacatttcaataagtttctgttaggagggatcactattcaaatttgaaacataatgccattagatctatgttaatgccctcttccaattccttacaaaagcaagaaagcaaaatgtgccgtgcatgcatttcaactttgaacctaccatgtcatggaactgaaatgttagtgtgggacaaaaagggcaccacctaaacagaacacaatgatgtctctaccttaccttcatctgttgggggataaaatatccggaaaacagaaaaacagttcactttcaggtcaataatatgcatagagtgtaggggcacatgccctgctagcctcatatcaaatatatcatagtaatcatactatccactatttgttaaacttcattatgctaccctccattaagtagattagcttctcacttttttttgtctatttttttttcaacttgaaagaagcacaactatatcaacaaatattagaggtctacaagctccactgcacatattgttaatactgtttacactgcaacattgggtcattcatcacaagccctattgcatttgggatgacgcatggtgtctagtttggccattcaattccatgaacgtgttggagtgctccctaccttaatttgttagccttcctggtcaatgtttgatcttctttcttggaaggtttttttttttttttttggtcttggataataagagatcatgagtgtcttccaattcactggatcaaagactaatctcgctagcagtgtgtgactgtcactgaccaaaaggaaatttacacattgtaaagatcaaacacaaagtctcctgctaaatagatcgctcttactcatgtaaacacaacatagacttacaccactatgtcaatcatttgcctttgagttctttcttggaaatttagcaaggaaaaaggaggaatgcccccttcaaaaggttatgtcgaattaatacaatgtcaacaatcttagaacagtcgttcacggaatatccctgtgtattaccattccttttgggttttaaaagtggcagatgtgttttgcatttggagtatggccattattttggaggaactccttaatatgcatcaatttatgaactttgaaatataaacctgttgaccaattatattatgcattctaaattgaaatttgcttgtattgctctatcatttgcaacttgtttatttgatttcaaactgagaggtatatcatatcaaattcttcaattgaattctacctaaatggtaaatactgaagctgtgcatgcatgttgacaacaacctgattttttttgtacaatggattggaaatatatattttacatgccatgttatttgtgtggtttaacttttatgctctggtttggatgttttttgtattataacatcctactatatgtgcacttcaatgacagaatgctcatctgttgcttttcaatctggtgtgggagttggagtccagtcaccaggtgttagtggtattggttccacctcattaccacagccacccaattctgtccattccccgtgtagccaacaatcattggtatcagttgtttcctaaaaataatgaagtgatgattgttggttctgtctaggcacacattaagataatgaattttgtgacaataatacattttccaaaatcattagcacctacttctaggtcaattactttgttatttactatttttggcaaaccacccaaatctgagcttgcttggcctgctgtacttgtttatttcaaattttacttgttaatctactagataataaaaccctattacccatagaaagaatcgacaaagttctaggtcacattttttatagagctagattgggattatgagatgtcttcctaggtaatttgtaacatatgatgaaatttttcacatgattcggggtcttagctttattcagattgttttctttgatttgtcatatgcttattttggggaaagcttgattttattgtctctaagtcctagaggtgctaatttttttaggcttcctttgacggaaacccattcaagattgttcctggacctttgaagctcttctggtagtgcatgcgttcaaaacccgggtcagattctcatcttctcttctcttatgaattttgtgaattgattcaacattgagcttcaaaggagctattgttgtaacatcgtggacatggatatgacacaatgtgggtggaattataagacatgacacaaatgtaacccaatgtatgaaattaacatataatacagtttttaggtatgaagacagaatgtatgttttaaaagtgagcataaatcattgtaaacataatagaaattttcctgagatcttgttaaataatactcatacccttatagtttttttaaaaacacttgtttccccttagaagatagcatcagaataattctttaagatttgggtattcctctccatctatttatggtccttcccccaaaaatcacataaaacacgcaatgaaaagagaaataaaaggagtgaacgaaagagcaaacacataccaatcataaatttataatagcagaattgtcgagaactcaggagtgtgcaatatagctctgtatctgcaatatatgaatacttttgccttctcaggaatcatgagacgaagagctgtgaaagttttttagtggtttccgttaatagagtaatgtatgttatcttccaggggagggtacagctgttagcttttctgcccgtatctgttttggggttttcttttatggctgtcagatttttggcacactaagtctgtttctcatataactggagttaggatttgtaatttaaaagaaaaattggataaatttgtaaattcgttcaccaatcgttgcatttcggcaatgtgtatttgtcgtctcttggtgtactgagttcttaggcaattgaatagcacagtaaatgaaaactgtggactgaagtgacttggttttgtatacactactttgtagtcataaggattcttttactgccttagttagagcattgtattcagactcagtggttgataccactttctgcaaggtagattcccaaatcactgtagtaccaaaagcagtaaaaacttatccctgttagtgacttccttgtgtctaagcagccaacacagtcagaatctacaaaaccctcaaattgcagtttcacgccatctctccttggctctaccataaaccaacatccttcccattgaacctctgatttatcttactatccatttcatagcctgccaatgagatttaccaggatttgccatgtatctgctgacaacacttataacataagcaatgtctggtcgagtgcatacaatggcatacattagtgatccaactacatttgcataagggattccttccatgtagatttctttctcaagagtcttaggagtttgatcagcacttaatttaaattgctgagacatgggagtcataacaggtttgcaattagacatgccaaacctttcaagtaacgtttctgaagtatgattcttgagatacaaacaacaccctcaattttgtgtcccttgttatctatatacccaatatccttttacctgaccccaagttttttaatttcaaattccttgctgagttaagacttcactttacctaactcatccttgttgttgctaggtatcaaaatgtcatcaacatacaaaaaaaatgcaataaatatactgtgctcaaggaatttaaggtatactcagttgtcacaatgacttctatggaaatttattcaagccataaattcatcaaacctcttattccattgcctaggagactatttgaagccatagaaggatttgtttgggttgcacacatcatcctctgtccccgtgacctcaaatatctctggttgactcattaaaatctcttcgtctagatttccatacataaatgcagttttaacatctttctactcaattctaaggtcaaattttgtccccatgggcaatatatgattcttattgacctatgtttcaccatagaaaagactttattaaagtctattccctcattttgagtgaagcctttggccactactcttgccttgaatctgtgtgactctattccaggtacctctttcttcttcttgaacaaccatttgcaattcgccacccttgaaccaagggacttcttcaccagtttccaggtttgattcaaatataaggttttcagaagttcttccattgcttgtagccgcttctgcccttcttgggtagctaaggtaacatcaacagtctttgaatccttctctaaaacctcactagcaatcactaaggcaaaggcaatttagtcaacatagttgtaccttttgaggaactcttatttcccttcttgtcttatctctggccaataggtaattgtcttctggtgtttgattgatgattgattcatcatcatcttgtggtctgtcagaccttgaaattcagtggaagtcattttgtatgtgttaaaacaggatttgttgaaattcagtggaagccataccgcctggatttgttgattctgataaaagcatggtctgcaaactcaagaaagttatgtatgtgttaaaacaggaacctagggcctggtatggaaggttaaccaaaacactattgacttttgactttgttcaaagcaagtgtgatccatcccttgtagtgttcaagactaattatgagtgccttttttatatacatatgttgatggtattttcatcatagggtgcttgtcagcactggcacttgctaatatattcctttttttaagaaaattaaagtcaacagtggtgtgaaggaacaaagtttaacagatatatatatatatatatatatgtaaactgttaggtttcagaaaacatccagcagagaaaataaaagcagaacccagtttcttttcaacaaacgtgtactccttgttccaagcaataccaagtactgagtcagtgtgactgtcatctttgtatttaattgatttctgcaaaaagaaatttaataagacatgactaaacatatacttaaaaatctataagcataaaacaatctcatggaaaagggtattctatcagttccattaacactttcttgtcagacaatcaaactttgaaaactgcagttaggacatctgcaatttctgaaaaaagaaagtctaataattgacagaagcaaaaacatggattttcatgctagtagattcaatcctgacatgcataagacatctgcaatttcagttccatctaaagctattaacaattccaaataaaaagtaacaaaatgcagaaaacaccaaaagatattacccaaaccattagttaacaaatatgtacccaaactttctgaataattgatgccttaaataacttgattttgaggtaatcatgtgattctaagggattgaatgtgccaccattttaagtaacttggttagagttttgtggacctttgattaaccatttgtactttaataagtgcaaatccttaaagtacatggcatgcttatagaccccaggctttgagttatgataaactgaaacaaataatggaaccagttcagctgttgctacctagcaccactttttatcgtatacaaaaattaaattggaacatttttttgtaaatctattgcttgtcctttagtgcactggtctaaatggttgtttttattcgtgggagacacaatggtggtgtggtattttaggcgttatacacatgtttatttataagcttgtgttctattgtatcattttgactgtattgtgagagcatttattagattctaaggttccacactcacagctttggtgacaaaggactggtatatggagttgagctgttgctcaaagcctccttggtatctttattagctaccactttttccccaattttttgcattctgacacggacaatgctttatacaatcgttataacctttacattatctagcacacttgcatatcaccaccaacattctttacccataggacatcaaccttttgattcaccaatagtttgtttacccatactacatttcacaggggaaaaaaacattaattaaaaatgctcaaataactcatgaatgggtaaccacaatttcatattcacagaccttgaccctccccagtccccataccatatttcctctaacttagaaggaagatcagtcaccttaaatgagcagttctgcatggttgagtttgtaccatgttacatgaaagaaaatattgttgcttggccatttaggatcatagacgactctattttttttcctgttttcatggtttctttgttctgaacttctgtcattgttgattatgttacatttatctgtcatatgaatttcccaatgtatacatctttcttaatgacataaacaacactttttcgccgacttcatatgagcagaatttaaacaaaggccacacaactgttatacttcattatatactaatatcttttattttagaaattttcactcaagaaacatggattccccctgccaattaatccgcagacaaacatagtagacttgatcctttgtgtctttgaataagaagacttcctgtaattgttaccattgttttgtaagtaccagcagagaactcaaagaagtgacttgtaattgcattttgcaggatatgtatgccaaggtttgagaaaaaattgaagacctgaatcgctaaaggctaaaaattgaatctcaaagacataccatagaagtcatccaaccgtaattaaggtaacaattctgtcccattctagcattctatgtttaactgtgtataatccgaaatgtgatctgtagcctgtcaaagagtttaattattaaccttttcattgacaaattgatatgcttcttgtctagcatagacagtataaaaatatcagtacttcttcaatatacttaattacaaacaattataccaatagtagagattttactgttaaaagaaaggtaatatgctagtagtgtatcaattacaacaaagcagaaattgaaattaaatttcaaattatgcccaaattactactcataacataagactaacaaagttaatattagttaccaagaaagattcaatttaaactaaaattaagggctacagattgttcataaaaaacatattatttatcaagtttacggtgatcaaatacacaaaaacaaaagaacaaacttaatccatttgactgtacactacactcttgttttgaaatggggtattattctgacaacttttggttggcaatgatacaccctatattcatcaacctaactatagggttgcttcctaagaatcagaccacaaaattgtattgttttggatatattgtaacaaattaagccacattctgtttcacgtgacatcttatatcacagcaaagaatcgcacctaatggcatgcatgctccatatacttaaaaatatgaaatcaggaaaatgataatatagctagctagagtggtagatgctagaaagtgaacaacagaaccacctataattatagttccctttcgtcagctttaagctaatagcagatttaatgatctgtcaggtttaccctttaatataatccttttattctatactttaatagccaaaaacatgttgtcaacattgtcttccacttctcccaatccacccaaccactctacccctataaccacatcagcaccacctacttcaaacaagtaagtggttttaaccatctgcaccccttgcaaggcaattgcgagcgttatctcacttctctccctatttgtacattgcatccaactgagttacctataaataactcagctttatttatacaaacttttttattagtatctaaaccccctgcaatatgcttgaccccacctcctactcgtatcaaattggaaagaccaaccataatcattctcttgtcaaccctaacagaacaaacaagtacaaatagaaatatgtacacacacttaacattgattaaaacatatcgaaacttgatggaagaggtgtccaagtttgtattagtcgaggtggtggtgggagtgtagaaaaagcaaaacccataatcattattgatgcatttctttgactttcactcaaatgtccgaaatacccaataaatatcaatagccactccaatagtcagccaaacacggtcaacattattcatttgcgatttaggttgttgaacactatgtatacatatattagcatacatacatacatatatagatgtacgtgtttgtgtgtgtgtgttatcctttgttttaaataaattttgtttgttgttttaggtccaagtgaaagactcggttaccccataaaggctttttttggttgttgatacaaaactcctttgcacaacttgaattacatcaggcagtataatcaaccttatactccatatcttcaggtattttatatgaacattaacttattgtcctactttctttcattgtttcagctttgtattttattgatgacaacatgcattgcattgtataaccttagtttcccgtttaaggttcaactcaatgattaatacggatagtttggattaatcgttgaattgaatcttgaattgtccgtttggacagtttgagaagtaatgcattttatgcaacattcatacatggacattacgtatggtttttttatatttaacgaaatttcggtcacctgcattttgctttgttctccgggtacatactgattgcggctgaataacacctccgctatcatgtcgtgtacttggagaccaatgcaaaatgctgccgaaattttgttaaaataatgaaaccttatgtactgtcaatgtatgaatgttgcataaaatattacttcttgaatgggatagggtcacacctgtttgtatacatgacattcacaaacatgcatatcacatttttaatttaaaagttggacagcagatggaattcctggatcgtagtttggatgaaagcaccaaggattacgaatgagtatgaaattggtgttgaacagtttcttcaatttaccacccaaaatgcaccatcgttgagggacaaatatttttgtccttgtgtcaaatgtttgaatgggagacggcaatccatagatgacatcagaagtcatctaatatgtgaaggcatcattccgacttatacaaagtggatatggcatggtgaattgccagccgcgcatgcagggaatgaaactaccatcgttgatctgaacaacgaggatcgtatagaagacatgattcgcgacctcgacgaagaacgttttcgccaagcccattcatcgacatattctaaactggagtctgattcaaagatccctttgtatgctagttgcacgtccttcacacgattgtcggcggtgttgtctttggttaacttgaaggccagatttgggtggagcgacaaaagtttcactgaattgcttcaactgttaaagaagatgcttcctgaagaaaacaccctccccaatactcactacgaagcaaagaagattttatgtcttatgggtatgcaataccaaaaaattcatgcatgtcctaatgattgcatcctgtatcgacatgagtatgcggatttgcgcagctgccccacttgtgggtccccaagatacaaattaactgatgataacagtaatgatgaaacaaactcattcagcggtcggcccgcaaaggtctgttggtatcttcccataattccaaggttttaaacggttgtttgccaatgcaattgatgccaaaaaccttacttggcatgcatatgggaggaataatgatggaaatctccgacaccccgtcgattctcctcaatggaaggcaattgactgtatgtacccacattttgccagcgacccaagaaacctctggattgcgctagcttctgacggaatgaatccttttggaagcctatccacaaaccatagttcgtggccagtattgcttatgatttacaacctccatcctttgttgtgcacgaagcgaaaatacataatgttgtctatgatgatagcgggtccacgacaaccaggaaatgatattgatgtgtatttggcgcccttgattgaagacttgaaacaactgtgggttgatggggttgatgtgtttgatgggcatctgcaggaaactttcaggttgcatgccatggtgttttgtacaattaatgactttccagcatatgggaatttgagtggatatagtgtcaaaggacatcacgcatgtcctatatgtgaaaaacataccagctttgtccaactaaaacatggaaagaaaacaatatatacaaggcatcgtagattcctccaaccatatcacccttatcgacgattgaagaaggctttttatggttgtcaggaaaatgaaatggcgcctaaaccgttagcaggcaaagaagtctatgatcgtgtgaaggacatcatgactgtttttggcaaaacccaaaagaaggatgcatctgacaagcaaattttggaagaagaaatcaatattttttgatcttccatattggtccgatttggatgttagacattgcatagacgtaatgcatgttgagaaaaatgtttgcgacagtttgattggcaccctcctgaacattcaaggaaagaccaaggataatttgaaatctcgacaagattttggttgagatgggtatacgacaccaattgcatccaattgaacaaggtcgacaaacttatttgccccctgcaagccacacgttgtctacaagagaaaagaaacaattttgccagtgtttgcggacattaaaagtcccacagggatactcttctaatatcaagagccttgtatcggtgaaggagcttaaattggtagggttgaagtctcatgattgtcatgtgttgatgcaacaaatattgcctattgcgatacgggtatattgccagaaaaagttagggttgcaattactcgtttgtgcttcttgtttaatgcattttgtaacaaagtcattgacctgaaccagttggatgatttggagaacgaggctgccgttgtactttgtcagttggagatgttttttcctccatccttttttgatataatggtacacctaattgttcatttagtcagggagataaggttgtgtggtccagtttttcttcgatggatgtatcctattgagcgttacatgaaagtgttgaaaagttataccaagaatcagcaccgtccagaagcttccattgttgaaagatatgttgccgaagaaagtattgagttttgttctgagtacatcgatgcacttaaacctgttgggattccacaaagccgtcatcagctgtcagtgggaggtaagggaacaaggggatacaatgtagtaacacttactcgacaacaggttgcacaagcacatttgtatgttttgaataacacaaaagatgttttgccttacatagaaatacacaaacaatatttgcaagactgtcacccaagaatgaacttcatgaaggtgctacaagaacataatagaacctttgttagctggtttaaacaacaaatacttgctgaatatagtgcctcaaagactttaagactgttagctgttggaccaaatctcaacgttcccacttggaaggggtacgacataaacaactgttccttctacacaaatcacaagacgatcatagtactgtccagaatagtggggtcagtgtcgatgccgcttcagagcacttttgtggtccatcttgataacaatccgattcaagcgacgctgccttactttggagtcattcaagaaatatgggagcttgattatactgccttcaaagtacctgtgtttaagtgtcagtgggtaaacggtaatactggtgtacatcaagatcgatttggatttacgttagtagaactggacaaggtcggttacaaggatgaaccttttatcatggcagaacaggccagacaggtgttttatgtccaggatccgtgcgatgacagattttcagtggtgttacgtggaagaacgtcgtccatgagtaaccaaaaagatgaaggtatatgtgaaattagtgacatacctggtttctcaacaaggataccttccgttgttgaagaccaagaggttgacgatgaacatgcaattcgtgttgaccatgatcgaaggttttatgggagaacattcatacgtaatcgcggcatgttaaagtaatgcttttatttactaaaaataacaaagaatataacaatgtttctcttcattaatgacgttacattacgaatattttgttgttgcaagttatatattttaatatacttacttatgtttttcaggtttgatggcaacaccttcctcggtcccctcctaattctaacgattgctcaaattccacatctacgaggagtagacaatccaccaagttacgcaggttgacattgagaaccttggattgaggctaggccaacggtaaattgtgaaccctaatactgggcgaggatctggcaaccacaaagagaaattccactagtctatctcggtgtcgttgcaagagagaagattccgataacacattccattggaaaagatgtaccggactccttgaaggatctagtatgggatgatattttggtatgcgtgcctacttattatttgtttgatgttgacaaactcactatacaataccttgtaaaatgaattactgttctgtgtcaatcgtttgtggcaggctaaatttgatatcccggaacatgtccaagcaaaaaagaaagtcatgtcattggttggcactagatggagacaatttaagtctaaccctaactagtaaattacatctatgctgacccaaaccgccaacgaaaagatgacccatcagttgtatgtatggtttggacacagaagcatggcagcaatttgttcaaatcagaaaatccctaacctggcaggtaaaccaaattagtttttcaaatgaattaagaggcattgtgaattatatgggattgaaagtaggatactaaagattactctttattatagggagtaaggaaaaaagctcaagaaactcagaaattgaatgactgcccacatgtgttgtcgcgtggtggttatgatttgcttgaaaagaagattatggacaaaaatattaagaaaccggcaacagcgatgcaatgaataccgaagattcatcatccgtcgtgcgtcctccttctcccattccaagacaggttaagtggaagatggcccgaaccaaaaaatatggttctatgacaactcaggccgcccaagaaatagcagaaaaaaattgtgagtatttcctggcatcgttgatttgcaacatttattagcataacatgtcaaatttagtggccctttcatgtcattaatgtaggactctttagaagaacaagccacaccaaggcgcatttggttccgcaaggtcaagatgacatactaaatactgccattggaaaaaaggatcaccctggtcgtgttcgtggagaagtgacaggggtgacaatcaaacaatactttgggcgtagttcacgtgcatctagtggttctttctgcatgcatcactccacaacaattggctgaaatagtcaaacacattaaggaagaatgcaaaagagagttaaaggaagaaataaagcttgagttgtcgcaaatgggctcaccgatgccacacacccagttcagccagaaatagaacaaagtagtggcgagagtcagcaccaaggggagttgtgcagaaaataagccaacccatctgccggacaaaatgtcaaagctgttaacccttgtatggggttgtatctacaatgtaaagattcaacacgactagtggcaatttaggcaaaatttgtgatgggaagtccaccattcacaatgtacaatatgcagatgatgttgttgtgagggttactgtttcgaccgttatcgacggggagccgaagtgccattccccaatgcagagattaaaaaggtcagagacaccctaaacacatttgttgcatggccaaaacatcttgtgaagcttgtgtcacatcaggtacctttgctaataattgaaattacctacacagggtttgttttaatgcaaatagaaggtcaatttttgttggg

SEQ ID NO: 2 - DNA, 1001 bp, Glycine canescens
  source 1..1001: mol_type = genomic DNA
  variation 501: note = r is a or g
  variation 25: note = n is a, c, g, or t
  variation 81: note = n is a, c, g, or t
  variation 144: note = n is a, c, g, or t
  variation 175: note = n is a, c, g, or t
  variation 220: note = n is a, c, g, or t
  variation 291: note = n is a, c, g, or t
  variation 317: note = n is a, c, g, or t
  variation 322: note = n is a, c, g, or t
  variation 362: note = n is a, c, g, or t
  variation 385: note = n is a, c, g, or t
  variation 396: note = n is a, c, g, or t
  variation 411: note = n is a, c, g, or t
  variation 428: note = n is a, c, g, or t
  variation 521: note = n is a, c, g, or t
  variation 547: note = n is a, c, g, or t
  variation 588: note = n is a, c, g, or t
  variation 603: note = n is a, c, g, or t
  variation 691: note = n is a, c, g, or t
  variation 853: note = n is a, c, g, or t
  variation 880: note = n is a, c, g, or t
  variation 936: note = n is a, c, g, or t
  variation 948: note = n is a, c, g, or t
catacacgacactacttgatgttanattaatacatatggtactccttttgtatacataaccattattgtgcattgcattanacaagtgatgcaagtatattatctttcattcttggggagtttctaatgatgtgactaaatttnaattaaattataattatataatgaatcgatnaaacaccggtatctcatttcggttgtagcctgatttagttcaacnaggtcaggtaaggtatgttcacatttatgtttgcatgtttcacctctgtagtcaagcattgaccatctccnttaggtgaatgatattaaaaacgttnggcangaatatttaccattagttcctgttttgcacattaatgtantattgagattaatcacccaaagncaatggtaggngtcaaccaaatctantcacccaattttcctanattttaccatttgacacctagcccatgtcaaaaactaaaagctagtattgctaagaatattttaacgttccaraaaccttgttttctgtagtnatacaatacgttaacatgcacaacanaggaggaataaataggaatctgaaccaacatgttactttgnccagtatttacaatntcatgcatgaaccaatccacaaaacattgatttacaaaaacctgtgacagcatcaaaataaataaaacaagataccaaaaaatatatngtaaacttccatattgtatatacagggagttacaaaacaaaggcttgatgagagtttagaccctgcaccgagagagagaacaaactggaaactaaaacttaagttagtacataaccctcaccgagtgaaggataattaaatgagaatcgaaacactacaggntggcacctaattacttgtaagattaanaatttgaaaagcctaagaacctgagaatattaatgcaacaataatctgaaatctgngttatatgcatnagaaaattagatatgtaaaagcatctaatttagcaaaatcctaaaagctttgt

SEQ ID NO: 3 - DNA, 17 bp, synthetic construct
  source 1..17: mol_type = other DNA
ttaacgttccaaaaacc

SEQ ID NO: 4 - DNA, 16 bp, synthetic construct
  source 1..16: mol_type = other DNA
taacgttccagaaacc

SEQ ID NO: 5 - DNA, 20 bp, synthetic construct
  source 1..20: mol_type = other DNA
gacacctagcccatgtcaaa

SEQ ID NO: 6 - DNA, 28 bp, synthetic construct
  source 1..28: mol_type = other DNA
catgttggttcagattcctatttattcc

SEQ ID NO: 7 - DNA, 1002 bp, Glycine canescens
  source 1..1002: mol_type = genomic DNA
  variation 501: note = m is a or c
  variation 10: note = n is a, c, g, or t
  variation 38: note = n is a, c, g, or t
  variation 141: note = n is a, c, g, or t
  variation 344: note = n is a, c, g, or t
aatggaatgnttcatgtgcctccttcaccttgtctgcntgccggcattggaaaatctttgagcattgattaaaactttggaaaaggataaaactggtaaaatattgagagaaaaaaaatctgaagggtgcatggcaccaantttgagagcattgtagagttgttccaagtttcataaggaagcaacaaactttcttttcttatcattctaataatgatgctttgcagataaggaataagtttggacatcaagtagaagccttctttgtgatattaactgccactcagtttcattttctgttctattgtacccgtccgcttcccaacattcttgctctgggcctnggtaaactacctagcttgttttgcttcttaatattcctgatagtgtttttcttgtttttaatgatgaatggcagtgtgaaaccttctagtcaatttcatggttctgtgctttctcttgatttattttgcagtgaatttagcatatggatactggttacgagggacgtttttatgcagctctaaactctctggtatgtatgttgtggttttatttcaggttcatctcaatacaaaatttttcttttgaatattataagctcttatgtattttttcttcacttcatataatatacatattttgccaagccagaatttcgtgattaaatattgtctcagaattagttttttaaactagtcttttaccgttaaattgctatttttaaaaaagaaaagtccaacttctcatattatcaagtttacaacaaccaagcttttttccattaggtggggccagttacatggatactatttctttattttttttcagaaatatttacttaatatttgattccgaacctattccattagattaacaaaacttaattctcatttgtatgtgtattgtgtgttgtgtatgtcaatgtgaactagttgcctgtgtaataacacatgtgaattctgtggaggcagtattggttacctcccaatgattattatt

SEQ ID NO: 8 - DNA, 16 bp, synthetic construct
  source 1..16: mol_type = other DNA
acgtccctcgaaccag

SEQ ID NO: 9 - DNA, 19 bp, synthetic construct
  source 1..19: mol_type = other DNA
aaacgtccctctaaccagt

SEQ ID NO: 10 - DNA, 23 bp, synthetic construct
  source 1..23: mol_type = other DNA
tgatgaatggcagtgtgaaacct

SEQ ID NO: 11 - DNA, 23 bp, synthetic construct
  source 1..23: mol_type = other DNA
accagagagtttagagctgcata

SEQ ID NO: 12 - DNA, 1002 bp, Glycine canescens
  source 1..1002: mol_type = genomic DNA
  variation 501: note = w is a or t
  variation 20: note = n is a, c, g, or t
  variation 143: note = n is a, c, g, or t
  variation 239: note = n is a, c, g, or t
  variation 304: note = n is a, c, g, or t
  variation 307: note = n is a, c, g, or t
  variation 350: note = n is a, c, g, or t
  variation 376: note = n is a, c, g, or t
  variation 664: note = n is a, c, g, or t
  variation 860: note = n is a, c, g, or t
  variation 887: note = n is a, c, g, or t
  variation 937: note = n is a, c, g, or t
  variation 957: note = n is a, c, g, or t
  variation 989: note = n is a, c, g, or t
gatcggaatagcctgttccnacaaaacttcagaaatctgttcaaactcttcgtctttcctttatctactttcaacaccccattatcgtcaatctttacaacatggtttgggggatgagaatggcgattttccttttcttcctnttgatagtcaatcacaatggagaaatatggttgtggagtgagaattttgatgaaataatatatggtctttctatggaactttatttttggtatttncatgcaaatgtaaagatcttattttttttagatgatgttaaaaatttaggttaaaatatatttgngantcttaataaatattcaaattttgtgtttactccccaataaatnttttcttgttttctttatttgatccntgatatttgaaatttcttgtttctggtccctaccattaggttaaaaatgttaagtgttgaaatgtttgtgaaatgcaatttttgatggtttctaaaacagccagtatttactttaaattttaaaatgacaatttatggcatctaaaaacaactagaatttacttcattgaggcacaccaacaactttcgatcacgacccatttcattctcctaaatcaggcaacgaaaatcagcgagtaagggcacgcttcattcgtcttgctctgagaaagaaaaactattaattganttttcaattagttgagcacaaagagagaaatcgaagcaaaacaaaaggtaggcatttgcattagacaaaaactatatttaagcatgccaatgcttgtgaaatgagatagcttgttaaaggctattgtatcctacatctcaatcccacacttttcattatattctgaaaaactcatttcaaaatataaatttgcatnttgaaatgatttttgaaaatacaatgntagatgtctaatgcaacattgaaattgaatgatgtaaatgtccatgttanaagaattgccaaagcctatngtaggcccaattgtcctacatataaggtcgcncaaacagtacca

SEQ ID NO: 13 - DNA, 21 bp, synthetic construct
  source 1..21: mol_type = other DNA
tgccataaattgtcatttaaa

SEQ ID NO: 14 - DNA, 21 bp, synthetic construct
  source 1..21: mol_type = other DNA
tgccataaattgtcttttaaa

SEQ ID NO: 15 - DNA, 24 bp, synthetic construct
  source 1..24: mol_type = other DNA
tttctggtccctaccattaggtta

SEQ ID NO: 16 - DNA, 21 bp, synthetic construct
  source 1..21: mol_type = other DNA
tgttggtgtgcctcaatgaag

SEQ ID NO: 17 - DNA, 1002 bp, Glycine canescens
  source 1..1002: mol_type = genomic DNA
  variation 501: note = m is a or c
  variation 344: note = n is a, c, g, or t
  variation 365: note = n is a, c, g, or t
  variation 624: note = n is a, c, g, or t
  variation 720: note = n is a, c, g, or t
  variation 785: note = n is a, c, g, or t
  variation 788: note = n is a, c, g, or t
  variation 831: note = n is a, c, g, or t
  variation 857: note = n is a, c, g, or t
  variation 982: note = n is a, c, g, or t
ctccgcgccctctcctccctcctccgacctgcaactcccctcccctctctcccccaaacaccattcaccctctccaccgtgtacgaagggtctggttcaagaacgccatcgccgcacgccaccgtcgcgagcctctttgttgccgtcaccgtcgccatcttcctccatcacgagcgtcgtccttgtcgccggtctcctccttcacgcgcgccggcctcctcgcgccgtcaaccaccaccgtctcccgcaccacaatatggttagtttccgtccttctttttgtgggtagttgatgaggatattgttttttattcacaagttccggttccttatataaggaacgngtttcagttttgacgaaacgnttcctccacgtcatgcacctccaacgctgaagctttccacggaacggtttcttcaatttaagaaaccctacaagcactcccgttggagatgctctaaagtacgatcagtagaatgtgatcggaatagcctgttccacacaaaacttcagaaatctgttcaaactcttcgtctttcctttatctactttcaacaccccattatcgtcaatctttacaacatggtttgggggatgagaatggcgattttccttttcttcctnttgatagtcaatcacaatggagaaatatggttgtggagtgagaattttgatgaaataatatatggtctttctatggaactttatttttggtatttncatgcaaatgtaaagatcttattttttttagatgatgttaaaaatttaggttaaaatatatttgngantcttaataaatattcaaattttgtgtttactccccaataaatnttttcttgttttctttatttgatccntgatatttgaaatttcttgtttctggtccctaccattaggttaaaaatgttaagtgttgaaatgtttgtgaaatgcaatttttgatggtttctaaaacagccagtatttactttaaattttaaangacaatttatggcatctaa

SEQ ID NO: 18 - DNA, 20 bp, synthetic construct
  source 1..20: mol_type = other DNA
ttctgaagttttgtgggaac

SEQ ID NO: 19 - DNA, 21 bp, synthetic construct
  source 1..21: mol_type = other DNA
ctgaagttttgttggaacagg

SEQ ID NO: 20 - DNA, 21 bp, synthetic construct
  source 1..21: mol_type = other DNA
caagcactcccgttggagatg

SEQ ID NO: 21 - DNA, 24 bp, synthetic construct
  source 1..24: mol_type = other DNA
ggaaagacgaagagtttgaacaga

SEQ ID NO: 22 - DNA, 1002 bp, Glycine canescens
  source 1..1002: mol_type = genomic DNA
  variation 501: note = s is c or g
  variation 121: note = n is a, c, g, or t
  variation 210: note = n is a, c, g, or t
  variation 340: note = n is a, c, g, or t
  variation 757: note = n is a, c, g, or t
  variation 875: note = n is a, c, g, or t
tgacactgcattgtaaaatttatatgaataattactatggcaatgtggttgcaagtatgtgaggaggtaaataaacttattgtttactagtgagattataagaagttccgaatacattccnagtcacaaaattgcagtgctctgatttcaaattcaaattgacaatagcataatccattatagcattttatagaaattcattcatacgcnaagtaactcgagcctaattaaaatgcaaaatcactaagatggcaaagttcttccgatgctatttttttttttttttttcctttcaaaaaactcaactaaggtcttacttcagacgaactaagtttcttgncatttgaattatcaggtggtggcaaaaagaaggtacccattttaataatagcaagtctatataacaataacgttgaatagaaaaaccattttcatgttgagaaacaaaataaatccaattatccagtgatctccgagcaatatttgggcagatgaaggtacggataatttcagtcaaacatgtggggaagtggtctgatagccataaatgcatccaccatctgaaagaattatggagaaagagaacatgtaagttttgcaccatataatagagacaacaaacatatataactgcattctcatcttgttcccataaaacaaggttgaaaactctcttctacccaccaaaagaatgtttattttgagaaagccttgattgtcacattccactaacttttccccttcgatttaatgaaaanaagagcacagaaaaaagtagagtgagttttttttttctccctctcatttccattataaaagagacaaacaacagagtttggtccttttgctagttcagacaatgattgtgtgtgtgtntgttttttttttctccctctcatttccattataaaaacagagtttggtccttttactagttcagacaatgattttgtgtgtgtgttttttttttctccctctcatttccattataaaagagacaaa

SEQ ID NO: 23 - DNA, 21 bp, synthetic construct
  source 1..21: mol_type = other DNA
tgactgaaattatcctacctt

SEQ ID NO: 24 - DNA, 21 bp, synthetic construct
  source 1..21: mol_type = other DNA
tgactgaaattatcgtacctt

SEQ ID NO: 25 - DNA, 23 bp, synthetic construct
  source 1..23: mol_type = other DNA
tccaattatccagtgatctccga

SEQ ID NO: 26 - DNA, 23 bp, synthetic construct
  source 1..23: mol_type = other DNA
ttatggctatcagaccacttccc

SEQ ID NO: 27 - DNA, 1002 bp, Glycine canescens
  source 1..1002: mol_type = genomic DNA
  variation 501: note = r is a or g
  variation 254: note = n is a, c, g, or t
  variation 356: note = n is a, c, g, or t
  variation 991: note = n is a, c, g, or t
gagctgtgctaatcagtccataggccattgccagtttttcactatgatagttgagcgcactttctttcttttccttgtctatgttatgcagaacacaagatacatctggggtgtatccagcatcttctagtttttctctcatctcatcaatcatttcataaacttttttagcatctgggtgttccctatctcccattatgaattcatgaagtgatccattcacttcaatggagctaacacccggttctttaacnatcccctcatctttcatagctctccttatatatgcaacatcaccccatctatttgctgatgcatatatgttagacattagaacattgtacccacttttatgnggttccaatgatagaaactgttttgctgcccattccccaagtttgatatttttgtgaagcttgcatgcagcaagaagggatccaaatacagccatgtttggcctcattggcatgcttttaattagttcatgtgcttcatcaagcagatcctgctctaccaagaagatccaccatacaaccatagtgctcaacttttgggacaaacccaaattcatgaaccattttgtgaaacagcctctttccttcttgcaacaatcctgagtgactacaagcatgaagagctccaatgaatgtgatgtcattaggggtaacacctagtgctttcatttcttcaaagagttctaatgctgcctcaccacgaccatgcattgcaaaaccagatatcatggcattccacattgaaatgtctcggtctgtggcctcagcaaacaatctatgagctgtatctatgtctccacagttggcatacatgtccacgaaagatgttttaagaatcatatcttctttaattccttgcttgtctatgtaagaatggatccacttacccatttcaagtgatccagcttttgcacatatcataaggaggctaaccatggttctctcatttggccttattccacaaccagtcatgttaanaaagatatca

SEQ ID NO: 28 - DNA, 18 bp, synthetic construct
  source 1..18: mol_type = other DNA
agagcaggatcgcttgat

SEQ ID NO: 29 - DNA, 19 bp, synthetic construct
  source 1..19: mol_type = other DNA
agagcaggattgcttgatg

SEQ ID NO: 30 - DNA, 21 bp, synthetic construct
  source 1..21: mol_type = other DNA
cagccatgtttggcctcattg

SEQ ID NO: 31 - DNA, 25 bp, synthetic construct
  source 1..25: mol_type = other DNA
tggttgtatggtggatcttcttggt

SEQ ID NO: 32 - DNA, 1002 bp, Glycine canescens
  source 1..1002: mol_type = genomic DNA
  variation 501: note = r is a or g
  variation 83: note = n is a, c, g, or t
  variation 155: note = n is a, c, g, or t
  variation 317: note = n is a, c, g, or t
  variation 421: note = n is a, c, g, or t
  variation 480: note = n is a, c, g, or t
  variation 518: note = n is a, c, g, or t
  variation 519: note = n is a, c, g, or t
tccctcccttcagctccccctcgtacacgtcgccgttcgcgtagggcaccacggagaagcgaaggcccgcgggctgtggttgngcctggaccgggcctgggcgggctcccacggtccagaagattgggagtttgaggctgggccgggccttgggnttgaggttgaggaagaggcggagggaggggattcgagggagggcgaggttgagagagaacaagagcgcggcggagaaggagaaggcggagaggaaatcgaggaggaaggagtttgtgggatgggagacgaggaagtagaagaaggggagcgagaggaagagnaagaggcggagacggtggcggcggcggaggagggagagaacggtggcggcagcggcggcggcggtggtgacgtggcgtggtcttagggttgggaatttgtgtanggttggggatttggagagatggggttgggtggtgagggaaggtcttttgtagggtgcgntggaggttagtgattggagaagcatcttggttcgggttnngagttagggttgggagtgggtggtggttgaaatcggaagagacgccgctgctttcttttccgatctggacttcggatttcttctgatgcattacataggagaaaaagaaaaaaaaaaaaaaaaaaaaaaaaaaaaaaaaaaaaaaacagaaaccaaactacttcgattcttcttgctccactatgttgtgtcaaaggttgttgtttgtgttttctgagggtggtattttgagtttcgttgtgtgtctatttattagttaaggtaatgcaatgaatggtgagaaagtattggcatttggaggaaagaagaaagaactgctgcaagttgcaactgggtgggcgtgggggtgggggtaggggtggggggtaagagagtaatttttcttgaaaggaaaatcactggaaatttatgagggttatctatctagtgttggctaaatttaataaatgtgagcatgttaacaaataaatacacttttaatt

SEQ ID NO: 33 - DNA, 22 bp, synthetic construct
  source 1..22: mol_type = other DNA
ttagtgattggagaacatcttg

SEQ ID NO: 34 - DNA, 20 bp, synthetic construct
  source 1..20: mol_type = other DNA
agtgattggagagcatcttg

SEQ ID NO: 35 - DNA, 20 bp, synthetic construct
  source 1..20: mol_type = other DNA
ggtggtgagggaaggtcttt

SEQ ID NO: 36 - DNA, 21 bp, synthetic construct
  source 1..21: mol_type = other DNA
ggcgtctcttccgatttcaac

SEQ ID NO: 37 - DNA, 1002 bp, Glycine canescens
  source 1..1002: mol_type = genomic DNA
  variation 501: note = m is a or c
  variation 392: note = n is a, c, g, or t
  variation 510: note = n is a, c, g, or t
  variation 511: note = n is a, c, g, or t
  variation 512: note = n is a, c, g, or t
  variation 534: note = n is a, c, g, or t
  variation 625: note = n is a, c, g, or t
  variation 713: note = n is a, c, g, or t
  variation 849: note = n is a, c, g, or t
  variation 865: note = n is a, c, g, or t
  variation 865: note = n is a, c, g, or t
  variation 901: note = n is a, c, g, or t
  variation 937: note = n is a, c, g, or t
  variation 983: note = n is a, c, g, or t
  variation 988: note = n is a, c, g, or t
tttcgcgtcaatcggacgtcccagtcaaaagttacgaccttctgtaatttacgaaaacatcgcaaaaaccctaggacactgtttcagcctgccacgtggcgccatctggtgaaacacgtcccatctgggcgtgtttaaacacgccccagatgggcgtgtttcaccaccccattttactaatttttgttcaaactaccccctttttccaattatttatttaatttgtattattttaaaaaattagcctaactttatgttgtctgcacatatgaatgattcaagtatattataatttatttgaatttttagagatagttaatgatcaattttaatttctatatattatctaaaattgattgaataaacaagtatcgttgcccactcctctcttnctcttaatcataatttctgctcttttgttctatctttgtgattttattcctttcaatgactcttgttcttcctaattcctcgcccaccaccatggccaacttctcctcacaaccagatnnncttactcctcagttctttgaangaagtcaactttgactccgttttccgtcaactctctcaggtcattcattcattcactcactcccccatctttctttttcacacttaatttntttctgggtttctttcgaatttcttgtttgtgctgcgtgcttgataaagttcttccttgacccctatcttttggtttcgagttttganttgacttgacatgcacgcatgcttgagtgttcaataatgcttttaattttgccaccatgcgggaatgcttttttggatttttttagggtttgtaaacggaaagatacacattaggtattgttttaggagggaattnaggtattgttatcttntcttcctgtgacatgaagaatcaatctggctttttnaatgggagatataaggttggttgggtgcttaagaangaagggaatgagggaaaggtcacgaaaactaacaattaacatttgncgatnaaaaaattctgtt

SEQ ID NO: 38 - DNA, 19 bp, synthetic construct
  source 1..19: mol_type = other DNA
aacttctcctcaaaccaga

SEQ ID NO: 39 - DNA, 16 bp, synthetic construct
  source 1..16: mol_type = other DNA
ttctcctccaaccaga

SEQ ID NO: 40 - DNA, 24 bp, synthetic construct
  source 1..24: mol_type = other DNA
cctttcaatgactcttgttcttcc

SEQ ID NO: 41 - DNA, 20 bp, synthetic construct
  source 1..20: mol_type = other DNA
gacctgagagagttgacgga

SEQ ID NO: 42 - DNA, 1002 bp, Glycine canescens
  source 1..1002: mol_type = genomic DNA
  variation 501: note = r is a or g
  variation 47: note = n is a, c, g, or t
  variation 133: note = n is a, c, g, or t
  variation 181: note = n is a, c, g, or t
  variation 253: note = n is a, c, g, or t
  variation 309: note = n is a, c, g, or t
  variation 312: note = n is a, c, g, or t
  variation 361: note = n is a, c, g, or t
  variation 426: note = n is a, c, g, or t
  variation 431: note = n is a, c, g, or t
  variation 495: note = n is a, c, g, or t
  variation 699: note = n is a, c, g, or t
  variation 715: note = n is a, c, g, or t
  variation 777: note = n is a, c, g, or t
  variation 946: note = n is a, c, g, or t
  variation 801: note = n is a, c, g, or t
taacttcacaaaaaatagaactctcacccattgtattcattctcctnttcccaaagcttatacatcttacaaaaacacacaaaaagaaataatcatacttctaagagcaatttaaggtgtaatcagctcaaantcttccatattcatatacaagaagtattctactcagtcaaacctcagntactgctggaggaaatgaatcttggattacattagaatcaaaagtggcataaggcatcaaaaattaaacttntatttacagtcaaattataaagcagatatgatagatatccaacacaatttgtgccnaanagccatgcaacaaaattcaaacttatatatcaatttcaagttcaagatncctgcttgcagaacccagaaggatctggttcagcagaatctacccctttgaactcttccgtgttngcatnaaaaaatgtagaactgaaaccttctcgatacttccttctcaaaaagagttgttgagtaatctcngtatcagatggtatttattgcctgtaaaatagtagatagcatgaaaggcaacaagccagtaagtattggattgaacagattaagacttaccaagaaaaactagcattattattattcataaccaatgtttatcaccgtaaattaaaaatcagaagagaaatggcagttttagccacccatgttaaccaattgttttactaaagtnaaaagtcattgatcanaacttcaaggatacaccaaaaaaatctataaaattaaaaatcacataatacaagatgtattntcaggattaaagatggaaagaaanccattatctacacaaatatacattgatactgcccctctttttgtttactcttcatatttttgcagccttgcaattctttttagtttagtacatcttcattctcattcaaaaaagaaaaaggacaaaataatttgacctatggagntgctttttactcaatcccctttttgtttcaccagagttaattataatgcagaaag

SEQ ID NO: 43 - DNA, 22 bp, synthetic construct
  source 1..22: mol_type = other DNA
aggcaataaataccatcgatac

SEQ ID NO: 44 - DNA, 23 bp, synthetic construct
  source 1..23: mol_type = other DNA
caggcaataaataccattgatac

SEQ ID NO: 45 - DNA, 24 bp, synthetic construct
  source 1..24: mol_type = other DNA
tgaaaccttctcgatacttccttc

SEQ ID NO: 46 - DNA, 21 bp, synthetic construct
  source 1..21: mol_type = other DNA
ggcttgttgcctttcatgcta

SEQ ID NO: 47 - DNA, 1002 bp, Glycine canescens
  source 1..1002: mol_type = genomic DNA
  variation 501: note = m is a or c
tccatggccacttcatcaaaacaagttccaattgcagttatcaagtccctcttacagcacttgaatcctattctagcaatgcagcaattcatagcttcctaataacatcttacatcaagaacaactgccctgcagatgcggcaaaaatctacacctatatgcgtgggacaggcactgaagtggacaattttatcataccatctgttcttaaagcatgttgtcttataccttcatttctactaggacaagaggtgcatggttttgtggtgaaaaatggatttcatggggatgtttttgtatgtaatgctttaatcatgatgtacagtgaggttggaagcttggcgtcggcacgctcattatttgataagattgagaacaaggatgttgtttcttggagcactatgattaggagctatgataggagtgggttgcttgatgaagcattggaccttttgagagatatgcatgttatgagagtgaagccaagtgaaattgcaatgactaagcatcacacatgtcttggcagaacttgctgatttgaaattggggaaagccatgcatgcttatgtaatgagaaatgggaagtgtggaaaattaggagttcctctatgtactgctttgattgatatgtatgttaaatgtgaaaatttagcttatgcaagaagggtttttgatggcttgtctaaggctagtatcatttcttggactgctatgattgcagcctatattcattgcaataatttgaatgaaggtgtgagattgtttgtcaaaatgctaggagaaggtatgtttccaaatgaaattacgatgcttagtttggtcaaagaatgtggcacagcaggcgctctagaattaggcaagttgttacatgctttcacattaagaaatgggtttacctcgtctttggttctggccactgcttttattgatatgtatggcaaatgtggtgatgttaaaagtgcaagatctgtttttgatagcttcaagagcaaagatttaatg

SEQ ID NO: 48 - DNA, 17 bp, synthetic construct
  source 1..17: mol_type = other DNA
tgatgcttagcattgca

SEQ ID NO: 49 - DNA, 18 bp, synthetic construct
  source 1..18: mol_type = other DNA
tgatgcttatcattgcaa

SEQ ID NO: 50 - DNA, 24 bp, synthetic construct
  source 1..24: mol_type = other DNA
gttatgagagtgaagccaagtgaa

SEQ ID NO: 51 - DNA, 22 bp, synthetic construct
  source 1..22: mol_type = other DNA
tcagcaagttctgccaagacat

SEQ ID NO: 52 - DNA, 1002 bp, Glycine canescens
  source 1..1002: mol_type = genomic DNA
  variation 501: note = w is a or t
  variation 210: note = n is a, c, g, or t
  variation 371: note = n is a, c, g, or t
  variation 590: note = n is a, c, g, or t
  variation 977: note = n is a, c, g, or t
  variation 979: note = n is a, c, g, or t
ggctttctcaaaataaacattcttttggtgggtagaagagagttttcaaccttgttttatgggaacaagatgagaatgcagttatatatgtttgttgtctctattatatggtgcaaaacttacatgttctctttctccataattctttcagatggtggatgcatttatggctatcagaccacttccccacatgtttgactgaaattatcntaccttcatctgcccaaatattgctcggagatcactggataattggatttattttgtttctcaacatgaaaatggtttttctattcaacgttattgttatatagacttgctattattaaaatgggtaccttctttttgccaccacctgataattcaaatgncaagaaacttagttcgtctgaagtaagaccttagttgagttttttgaaaggaaaaaaaaaaaaaaaaatagcatcggaagaactttgccatcttagtgattttgcattttaattaggctcgagttacttatgcgtatgaatgaatttctataaaatgctataatggattatgctattgtcaatttgaatttgaaatcagagcactgcaattttgtgactnggaatgtattcggaacttcttataatctcactagtaaacaataagtttatttacctcctcacatacttgcaaccacattgccatagtaattattcatataaattttacaatgcagtgtcatggtatacttttttgagtggtagcaattttgcgacttcagtttttgtgattaaaaagatacagataagctattctgccactaacgattttgaaaaacaagtgaagaggttgttcatcaactaaattttgttgagtattaatttaacatgttaagccttgtatgttaagcccaaatttgcaacttaaggaaagtattattttatatattaaatggtaataattaaactaaatcagtattaaatttaatcaacattctaaaaaaaatancnatgcctctaaatattaattaaa

SEQ ID NO: 53 - DNA, 20 bp, synthetic construct
  source 1..20: mol_type = other DNA
ctcgagttacttagcgtatg

SEQ ID NO: 54 - DNA, 19 bp, synthetic construct
  source 1..19: mol_type = other DNA
tcgagttactttgcgtatg

SEQ ID NO: 55 - DNA, 24 bp, synthetic construct
  source 1..24: mol_type = other DNA
cggaagaactttgccatcttagtg

SEQ ID NO: 56 - DNA, 24 bp, synthetic construct
  source 1..24: mol_type = other DNA
gcagtgctctgatttcaaattcaa

SEQ ID NO: 57 - DNA, 1002 bp, Glycine canescens
  source 1..1002: mol_type = genomic DNA
  variation 501: note = r is a or g
  variation 203: note = n is a, c, g, or t
  variation 381: note = n is a, c, g, or t
  variation 425: note = n is a, c, g, or t
  variation 537: note = n is a, c, g, or t
  variation 646: note = n is a, c, g, or t
  variation 785: note = n is a, c, g, or t
  variation 792: note = n is a, c, g, or t
tattaactgagagcataacaacatttcttattctataggccaataaatggtaaaatgatatcagcaaaacagtaaacacaacaacaaatccaaaactttagaaaagtaaaaagagtagagaaaactcttacagagggaaacacagccttgggagcatcttcaccagcataaccagctttacaagtgtgtgaacccaagtcaantactatagctgatacttcatctgtggattcagccaaagggagaaaattgagttcacatctcagaagcaaaagaaagagaatgagaaggggaaatggttttgatactcaccaccgccatacatggctgtgactgtgctacgagcttgacaggggaattagggtttttgaatttcagggnttatgaatttcagagtagagaaatggtttttgaattttctctcnctagggtttcagtagagagagaagctgcggcgacaaggagcgccgccgcgggaaattccggcgagatggtcggagagaggaaagtcgaagactcgaagtgaggagcgcgcgcnatttgaagaaagaaaaattagggtacggtaagggctacgatacaacataagcccacaaaaagaattcacaacacaagggatttcaccgttatacccacgtcaggagtcnaacacttttttttcaagagtaaattaagccagtacttctcgtattttactcgaactactgtgatacccgtgctatattgcatgggcatggggtcactttaaaatttatatatacattgaaattatttgtatataatttnaaagggntattattatattattataaatgttttgaaatattgctttagcttaacataattatcctaaatataaaaaaattgaataatgttaatataaaaaaatggatagtgttactattaaaacaacaatcaaaagataagtaaattttaagataaaatacatgttaaagaaaaaatacaattaaatttcaatgtgaataaattcacttataatag

SEQ ID NO: 58 - DNA, 18 bp, synthetic construct
  source 1..18: mol_type = other DNA
tggtcggagaaggaaagt

SEQ ID NO: 59 - DNA, 18 bp, synthetic construct
  source 1..18: mol_type = other DNA
tggtcggaggaggaaagt

SEQ ID NO: 60 - DNA, 18 bp, synthetic construct
  source 1..18: mol_type = other DNA
cgggaaattccggcgaga

SEQ ID NO: 61 - DNA, 21 bp, synthetic construct
  source 1..21: mol_type = other DNA
cgctcctcacttcgagtcttc

SEQ ID NO: 62 - DNA, 1002 bp, Glycine canescens
  source 1..1002: mol_type = genomic DNA
  variation 501: note = r is a or g
  variation 385: note = n is a, c, g, or t
  variation 746: note = n is a, c, g, or t
  variation 770: note = n is a, c, g, or t
taattgaagaaaggcacctaatcccaactcaaacaacagaaccagataacatatagcaaccatgcattcaattttccatcatatcccctagctaaaaaaaaaacgtagctaaatagagttaatcttaaactattcttttttctgaaaaacacacacacacgtgtaaaaaacaaaatgcatgaaattctcttccttttttcccccaaaatcaaattctcatattttaccagaacgtaaacaacccgagagaatagattaatatagagacaagttgataacaaaattaactacaactctacaaggcaatcaatattcaatcctacattgaagttcaacgaaaaaactcaacttcaaattcagcttcaactcatccctcaccacacanacacacacacacgaaacacagtaattagaaggaaacggagaaaaacgtcaccgttgcaagtgacggaagaggcacgtaccttcttcaagcgaattgctcgaatggcgtccctatcaggaagttgaagtggtagacgacgacgctgagctccggcggccgcgaccggcggccctggtgtcggaggcggcggtggaagaagagctggcgcgaagaacgagcatgcgaggtgttcgacgaaatgcgtgagagtgaaagaagtgcttcaacgggctccatgttagattgcacagttttagcgcttccattctctctttcaccactggggcgtaatatccgtttatttatctgtttggtttgggatngcacgcacgacattacaatttttnattttttttgccttgtcaatgctccaaaagaattttgtaaatgttgggaattgattattgaattatagtattttgtaattactgccttaactatttggattgcacggcattacagttttaacgactacaacatctaaataatagtattcttttttaaaaagttttgttaatatccgatttaaggatgattttaaataaataaaaaattatttaaaatatcttatgtactga

SEQ ID NO: 63 - DNA, 18 bp, synthetic construct
  source 1..18: mol_type = other DNA
cttcaacttccgataggg

SEQ ID NO: 64 - DNA, 19 bp, synthetic construct
  source 1..19: mol_type = other DNA
ccacttcaacttctgatag

SEQ ID NO: 65 - DNA, 23 bp, synthetic construct
  source 1..23: mol_type = other DNA
gcacgtaccttcttcaagcgaat

SEQ ID NO: 66 - DNA, 19 bp, synthetic construct
  source 1..19: mol_type = other DNA
agctcagcgtcgtcgtcta

SEQ ID NO: 67 - DNA, 1002 bp, Glycine canescens
  source 1..1002: mol_type = genomic DNA
  variation 501: note = m is a or c
aggatggcaagccaaagtgaatgaggtccttgtggttggagaagtggtttgcttaattttaatgacaacaagcaccaaaaaaatccggggttaccaaccacgatgcatatcttcctgtgatgtctggtgttattcttttaatatcttattattgtattatgcttatgcttcataagattctaaatgaatttaaaagaaaaagaaagaaaagttcatacgaagggatgttcctgtcattcaatgttcatccgtgaatatgttctgtccggttaattgttgatattgatatatcacatacccaaactttgttttattgttatgcgaatgaaattatgtaaataacaagattacaacaacttgtgttcaaccctgcctgaaggaaacataactacatatatgaaaactgtctaattaaactaacagcatagccaagaaagcactgagcataacagttatctgcatacgagtgaactgtgctccaacaacaagcataacagaagacagcagatacaaacacggtaaaactgaacattcctactatcacaagccatagtgaattgggtccttgtggttggagaagtggcttgctgaattttaatgaacacaaacacacacaaaatgtgaaggtggcccaccacgatgcacatcttcccatgatttctggtgttctttcaacttcagaactagtgttcattgatgttctactatcctctttcccctggaatacacataatatacatcacaccatatatcattgcataagttaaataactcactacacacgcaaccagaacaaaatgcataattgtgttcaatgtgtactcaaaagctaaaaggttgtcctgatttctcatcaccttctcaaacttgtatggtgttaggcaggggcagatccataaaataaatcaagggggacactcaaaagttcaaatacatatccagaaaaataattacaatatcattattctaggccttattttttggaattccttcataattacc

SEQ ID NO: 68 - DNA, 17 bp, synthetic construct
  source 1..17: mol_type = other DNA
tgtatctgctgcttctg

SEQ ID NO: 69 - DNA, 18 bp, synthetic construct
  source 1..18: mol_type = other DNA
tgtatctgcttcttctgt

SEQ ID NO: 70 - DNA, 20 bp, synthetic construct
  source 1..20: mol_type = other DNA
acgagtgaactgtgctccaa

SEQ ID NO: 71 - DNA, 23 bp, synthetic construct
  source 1..23: mol_type = other DNA
ggacccaattcactatggcttgt

SEQ ID NO: 72 - DNA, 1002 bp, Glycine canescens
  source 1..1002: mol_type = genomic DNA
  variation 501: note = r is a or g
  variation 19: note = n is a, c, g, or t
  variation 83: note = n is a, c, g, or t
  variation 129: note = n is a, c, g, or t
  variation 191: note = n is a, c, g, or t
  variation 599: note = n is a, c, g, or t
  variation 750: note = n is a, c, g, or t
  variation 922: note = n is a, c, g, or t
  variation 951: note = n is a, c, g, or t
agtcatatagattcaaacnagaagaagaacaatatagttagagcaccatacctctgaaaatgcatttgcaacccaaaaccacngagtttttcattgataataacacgagtcccaatattaggtatctgnattggaagctataaacacaagaagtaggaatcagttatgcttaaaaatagtatgccattatncttagaaatggtacaataaagagaaaaagttttgggttccaaacctgactaaaagaaataggagctgaggcaggagttgcttgtaacagtacttgagcagatgaaagttgatcagacaatcccagaggtgtaaacttttcattttccaccaatgctcccaaggaaatatgaagaggaccagcatactatcaacccataaacatgcaaagaaataatatataagttatcaaaaaagaggtcagtggagcccaaaagtatgtaagaacatacctgagacagtacatgtggatgagcccccgtattggatggagttggtgactacaagtggtaattcagcttgttttactagaggtacagggccacattttatatcagtaatcatttttgattgagatgccccaacatcttnattagagaaatcaggatttccttccatttctctttttctatccttcaggagggaagttggtgtgacatccatcatatctacactaagattttttaacaaaacctgtatagcacaagatttcaacaaataggtggatgagagacaaaattangccaatgacactccagcaaggaaaaaaaactgacctctatgtcaaacatgaggttcattgtcaggtttggcattgaataaatctcagcaagcaatcccaaaatggccctagtccaaggattagaaggttcatatgcaagactgctttggcatgatttgaggacctttgacanaaaattgaatgaaaatgtagcacactatngaatataactagaaaaaaataatcacaattattgggaaacacccaagtcc

SEQ ID NO: 73 - DNA, 19 bp, synthetic construct
  source 1..19: mol_type = other DNA
ccgtattggatggattggt

SEQ ID NO: 74 - DNA, 18 bp, synthetic construct
  source 1..18: mol_type = other DNA
attggatgggttggtgac

SEQ ID NO: 75 - DNA, 23 bp, synthetic construct
  source 1..23: mol_type = other DNA
cctgagacagtacatgtggatga

SEQ ID NO: 76 - DNA, 21 bp, synthetic construct
  source 1..21: mol_type = other DNA
tgtggccctgtacctctagta

SEQ ID NO: 77 - DNA, 1002 bp, Glycine canescens
  source 1..1002: mol_type = genomic DNA
  variation 501: note = m is a or c
  variation 176: note = n is a, c, g, or t
  variation 495: note = n is a, c, g, or t
  variation 670: note = n is a, c, g, or t
  variation 897: note = n is a, c, g, or t
  variation 909: note = n is a, c, g, or t
catatacccttgcacatatatctacgtggatgcaactttttaaagcaattacatgatacatgatgtaacttataaatcatgctaaccttttcataaccatatattgtgcaaaccaaggatagtactgctctttcaaaatttcagtgaactcttttgctttagaatcaatgttagcnacaaaaatattattaatcataaatgatatcttgtcctgaacctttgaccctggagcctgttaacatcataaaaaagcaggtgaaagaaatccaaatttagatttgtctaagaaattaaagtaaaattgggagcggatgaaaaatgaaacacttgaaaactattttgtaagaaaatatgtaaaatcattgagaatctaaacaactgatcaaatccatcaacaaaactcaagaaagcagccaatctgataaatttattgtaaaaggctagagcacctcaataggagtttctcttttctcagcagcagcaaccaaagtttcnatgttacgaggcagatgcaaaccctacataagatgcacagatcaaaggaacacaatgtatcttcagaaattaaaggcagaaataaaggctagtatttgtggctttatgctaatcaacacaggtaagagaaatatactggttgaagtagctccacgggaatgacaaacaaatccacnagacgaaagcattgaggaggtgctgactgtgctatgtaactgcaattgtaacaacaaaattaatatgagcaagagcgcaataaaataaagcatgggaaactgagaaattgcagagtaaagacctgagagcaatctattatagatatatgcagcctctccaactcctcagaattttgtctagaggcaaccaagtcagtatgagatttaagaacctgtagtcggaaaangtcagatagganagtaaaaatgaaaatcaaatgaggccagggcaggctgataaacaaaatattaatgtagaaccttcaaaaaggtagcagttgtctcaacacag

SEQ ID NO: 78 - DNA, 16 bp, synthetic construct
  source 1..16: mol_type = other DNA
catctgcctcgaacat

SEQ ID NO: 79 - DNA, 18 bp, synthetic construct
  source 1..18: mol_type = other DNA
tgcatctgcctctaacat

SEQ ID NO: 80 - DNA, 18 bp, synthetic construct
  source 1..18: mol_type = other DNA
ctcagcagcagcaaccaa

SEQ ID NO: 81 - DNA, 25 bp, synthetic construct
  source 1..25: mol_type = other DNA
gtgttcctttgatctgtgcatctta

SEQ ID NO: 82 - DNA, 1002 bp, Glycine canescens
  source 1..1002: mol_type = genomic DNA
  variation 501: note = r is a or g
  variation 168: note = n is a, c, g, or t
  variation 300: note = n is a, c, g, or t
  variation 575: note = n is a, c, g, or t
  variation 622: note = n is a, c, g, or t
  variation 735: note = n is a, c, g, or t
  variation 787: note = n is a, c, g, or t
  variation 824: note = n is a, c, g, or t
  variation 826: note = n is a, c, g, or t
  variation 887: note = n is a, c, g, or t
  variation 912: note = n is a, c, g, or t
  variation 962: note = n is a, c, g, or t
  variation 947: note = n is a, c, g, or t
ggggtagtatattggcatcacttggctccttccagcaaatgtggttctccaaatccgagtaattataaactgttcaccaaacttgcgattatactagttcattaatgttgatatatatttcactttgcctatcttgtttctcccttttctcataaaagctacgcttcnaaatcgggctttcattaaggataattttacactgaatcattttaatgcatttctgataggtatgaagagcatggagcttcatatatccaaaggaagtgtccatgagctgctgttggtacttgtacaagtttnttttactgccatttatcaggaagtactatgaacgctgatgtagtgattgtctactaatggatttttattttcctatttaatggccattcccattagatcccaattctaactaaattattggcctcgaggtgaatcacagcccacctttaactgatcttgtgatgatgtaaaacttgtaaagtgtgcctagagtctgtaacagattgccccatttatcaaattagatctctcctgtgtacgtctctttttcttttcttgggtaaatgtgcatacttngtcatgacttgaacttacaaaataagcctctaaacttatctttaaantttgtagaaatattggaagtgttcctccccaatttgattcattctaaattaataaaggtgttcaaaattgaatcaaatgatttttagctagataatttcatgatttgtgcaanactcgagcaacaaaagaccctctacaccacggagatggtattttttagctgnaatttgtaatcctttcttgtgcatatggccaaagttngnaggctcgagtttcaatgggcatgttgaccattttttttgtgtgcatattcttcatttttgnatttcaccagcccaacatcatcaancttttgactcagatgaagttgagacctattttatntaagtgtatgcttcnactattttgcttgtgacatcgtttcccatcgtcattgta

SEQ ID NO: 83 - DNA, 20 bp, synthetic construct
  source 1..20: mol_type = other DNA
tagagtctgtaacaattgcc

SEQ ID NO: 84 - DNA, 20 bp, synthetic construct
  source 1..20: mol_type = other DNA
ctagagtctgtaacgattgc

SEQ ID NO: 85 - DNA, 25 bp, synthetic construct
  source 1..25: mol_type = other DNA
gcccacctttaactgatcttgtgat

SEQ ID NO: 86 - DNA, 25 bp, synthetic construct
  source 1..25: mol_type = other DNA
gagacgtacacaggagagatctaat

SEQ ID NO: 87 - DNA, 1007 bp, Glycine canescens
  source 1..1007: mol_type = genomic DNA
  variation 501: note = m is a or c
  variation 26: note = n is a, c, g, or t
  variation 81: note = n is a, c, g, or t
  variation 225: note = n is a, c, g, or t
  variation 258: note = n is a, c, g, or t
  variation 288: note = n is a, c, g, or t
  variation 420: note = n is a, c, g, or t
  variation 427: note = n is a, c, g, or t
  variation 430: note = n is a, c, g, or t
  variation 443: note = n is a, c, g, or t
  variation 591: note = n is a, c, g, or t
  variation 634: note = n is a, c, g, or t
  variation 635: note = n is a, c, g, or t
  variation 636: note = n is a, c, g, or t
  variation 637: note = n is a, c, g, or t
  variation 840: note = n is a, c, g, or t
  variation 968: note = n is a, c, g, or t
tatggtgataggttagttttgtctantatttaaggttttatgcatttttttcttccctaagccaattattgtgatgcaaancattccatgcttttgattggtagacttggaagatctagtatgggatatggtggtggcagcagaagttctatttccagtcaagattcacatgggttgtatagcagtcgacagggcatgagttatggaggaggtgggttttttacntttttttgctaatagtctgatttattgttgtcngcatcagaatctttgtttcttacattttgncgtgttccatgtcaggttcttttggtagtggtgatgttggtggcatgtattcatcaagttatggtggtgattacatttctcgtggaagtgatgtaatgatcctggtctttcttagtcgctataggaagtagngttatanatncatatatttttgntttattcttatttattgtttttcctgtgctgtaggttggtggcagctcatattcatcacatgtattctggaaggggtgtgggtggtggtagcagttatatgggtggcggcggatcaggatcttattattgaggtaagtcatctgataanttcttgggattgcattttgtggagtacatcaggatgcatccannnnatataagtttatatttttctgagagatttctctatcctcgaaatagcatctcttatttttttcacaagtgccggcgaaggttgcactctggtcaccagtgcatttgtctgtgaacagatctgataagataaagtggctgctgtaggatgactgttgaagcatgatgcctacaatttggagacaaaggattgctatttatagcntttttttttggaaattgtcacaaaatctagcttatctcaattagagatgagatgtattcatcaagttatggtggtgattacatttctggatcagatgtattatcagtacttgaatttttatgctgtanggactcaagttaattagagacggaaaaagtattgagca

SEQ ID NO: 88 - DNA, 21 bp, synthetic construct
  source 1..21: mol_type = other DNA
cagctcatattcatcaatgta

SEQ ID NO: 89 - DNA, 22 bp, synthetic construct
  source 1..22: mol_type = other DNA
agctcatattcatccatgtatt

SEQ ID NO: 90 - DNA, 20 bp, synthetic construct
  source 1..20: mol_type = other DNA
ttcctgtgctgtaggttggt

SEQ ID NO: 91 - DNA, 21 bp, synthetic construct
  source 1..21: mol_type = other DNA
ccgccacccatataactgcta

SEQ ID NO: 92 - DNA, 1002 bp, Glycine canescens
  source 1..1002: mol_type = genomic DNA
  variation 501: note = m is a or c
  variation 54: note = n is a, c, g, or t
  variation 318: note = n is a, c, g, or t
  variation 325: note = n is a, c, g, or t
  variation 481: note = n is a, c, g, or t
  variation 538: note = n is a, c, g, or t
  variation 695: note = n is a, c, g, or t
  variation 711: note = n is a, c, g, or t
ttggggagtaaacacaaaatttgaatatttattaagaatcacaaatatattttnacctaaatttttaacatcatctaaaaaaaataagatctttatatttgcatgaaaataccaaaaataaagttccatagaaagaccatatattatttcatcaaaattctcactcaccaaccatatttctccattgtgattgactatcaacaggaagaaaaggaaaatcatcattctcatcccccaaaccatgttgtaaagattgacgataatggggtgttgaaagtagataaaggaaagacgaagagtttgaacagatttctgaanttttgtnggaacaggctattccgatcacattctactgatcgtactttagagcatctccaacgggagtgcttgtagggtttcttaaattgaagaaaccgttccgtggaaagcttcagcgttggaggtgcatgacgtggaggaagcgtttcgtcaaaactgaaangcgttccttatataaggaaaccggaacttgtgaataaaaaaacaatatcctcatcaantacccacaaaaagaaggagggaaactaaccatattgtggtgcgggagacggtggtggttgacggcgcgaggaggccggcgcgcgtgaaggaggagaccggcgacaaggacgacgctcgtgatggaggaagatggcgacggtgacggcgacaaggagnctcgcgacggtggcgngcggcgacggcgttcttgaaccagaccctccgtacacggtggagagggtgaatcgcgtttgggggagagaggggaggggagttgcaggtcggaggagggaggtttttgtttttgttttttctgtttggggggaggggagggcgtgacagttgagagaaaagaagtgggtgaatggaggtttcttgaagaaggaagggagaaggacgcgtgagggagaaatatgtgggaagcaatattagagtgcaggaatcaacaacctaaaaaaatataacactctctacactattgga

SEQ ID NO: 93 - DNA, 19 bp, synthetic construct
  source 1..19: mol_type = other DNA
acaagttccggttccttat

SEQ ID NO: 94 - DNA, 17 bp, synthetic construct
  source 1..17: mol_type = other DNA
caagttccgtttcctta

SEQ ID NO: 95 - DNA, 21 bp, synthetic construct
  source 1..21: mol_type = other DNA
ccgttccgtggaaagcttcag

SEQ ID NO: 96 - DNA, 25 bp, synthetic construct
  source 1..25: mol_type = other DNA
ccacaatatggttagtttccctcct

SEQ ID NO: 97 - DNA, 1002 bp, Glycine canescens
  source 1..1002: mol_type = genomic DNA
  variation 501: note = r is a or g
  variation 36: note = n is a, c, g, or t
  variation 121: note = n is a, c, g, or t
  variation 259: note = n is a, c, g, or t
  variation 337: note = n is a, c, g, or t
  variation 525: note = n is a, c, g, or t
  variation 535: note = n is a, c, g, or t
  variation 571: note = n is a, c, g, or t
  variation 656: note = n is a, c, g, or t
  variation 686: note = n is a, c, g, or t
  variation 757: note = n is a, c, g, or t
  variation 771: note = n is a, c, g, or t
  variation 775: note = n is a, c, g, or t
  variation 777: note = n is a, c, g, or t
  variation 787: note = n is a, c, g, or t
  variation 788: note = n is a, c, g, or t
  variation 834: note = n is a, c, g, or t
  variation 953: note = n is a, c, g, or t
  variation 985: note = n is a, c, g, or t
catttgattcatgtcaatagccttatcctcaacaancacagcagattcgttctcttcaaccacaagctgtttctcttcaacagcaggattctcttcttccaccaccaccttctgctgttcntcctcagcatcaacaacaacgacgggctgttgtttctcttcaaccttcactgtctcctccgcaggttcatgttgctgttggttctgtgcagccttcggggttcccctgccacctctgccacccctcttcgaggcgctngacgcggaccctcgcttcgccgtcttcggaggcattttcgaaacgaaaccctagattgtagggaacgatgaattgaancgctggttttgcgagattgagggttccaaggaaaaacctaacgaggaaatcgaaattggaagtgaaagagaagaaaacactgaatgatcaaagaaaagggtaattggggatcgaaaagggatgagaaaaccctaacgagaatcgaaacaaaacaaaaccccacagaaggaggcagaaagaacttttaanagcgagatcnatgagagatgctagagcctccgaatggaagatcctnaataatccttctaaccattgaaaatttgacacttgtctattaaattttggcttaaattttgatctcttatttttttaaatatatnattttagtatctcttttttaaaatagaganatttaatatttttatttataaaattccacaatttcaattcatctactttaaaataaaagtatttagttctntagttttatattcntaantntgatccttcnntcaaattcaaaaaactttgtcagtaaatgaaattcataatttgttnttcgaagatagtttattattgtaaaagagtaatttttattaaataattttattaataaataaatatttaaatataagacatagaatttattctcgattgtaagttctttttcatcaaanaaacaatttcatttcaacttattagaggattntctaatatttaataca

SEQ ID NO: 98 - DNA, 21 bp, synthetic construct
  source 1..21: mol_type = other DNA
aaacaaaaccccacaaaggag

SEQ ID NO: 99 - DNA, 18 bp, synthetic construct
  source 1..18: mol_type = other DNA
acaaaaccccacgaagga

SEQ ID NO: 100 - DNA, 24 bp, synthetic construct
  source 1..24: mol_type = other DNA
gggatgagaaaaccctaacgagaa

SEQ ID NO: 101 - DNA, 21 bp, synthetic construct
  source 1..21: mol_type = other DNA
tccattcggaggctctagcat

SEQ ID NO: 102 - DNA, 1004 bp, Glycine canescens
  source 1..1004: mol_type = genomic DNA
  variation 503: note = r is a or g
  variation 18: note = n is a, c, g, or t
  variation 38: note = n is a, c, g, or t
  variation 91: note = n is a, c, g, or t
  variation 291: note = n is a, c, g, or t
  variation 321: note = n is a, c, g, or t
  variation 340: note = n is a, c, g, or t
  variation 341: note = n is a, c, g, or t
  variation 464: note = n is a, c, g, or t
  variation 509: note = n is a, c, g, or t
  variation 572: note = n is a, c, g, or t
  variation 628: note = n is a, c, g, or t
  variation 638: note = n is a, c, g, or t
  variation 700: note = n is a, c, g, or t
  variation 784: note = n is a, c, g, or t
  variation 829: note = n is a, c, g, or t
  variation 831: note = n is a, c, g, or t
  variation 875: note = n is a, c, g, or t
  variation 1002: note = n is a, c, g, or t
ctgaagcttgggttgctntaaacattgctgctgggttncaacaccaacagtggtttaatttttggttgtctatattctggatattgtatgnctttagttttaaattgtagttgcattggctgggagcattttcccaatgcgcttggtaacctcagtttaaaactaaactcatcatttatattaaagaaaccacttatggttgatcattaaattactatattctgcattttttattgaatttacttttaagggtagtcagacacttcagtagtgaccagctatccttgtagngcggtctttggtgtttagatgctagtaganctctaatttactgataaanngtgtttaagttgcaggttaaaactgtgtttattgatgcattgcctccttcatgggatgaagattatgtccgggatcttctcaagaaatatggtgagattgaaaagattgagcttgccaggaanatgcctgctgctcgtaggaaggactacgggtttgttacagtttggntcacatgatgctgccgtaaaatgtgctgatagtattacaggcacagagttgggtgagggaganaagaaggtctgtcttggatattaataaactgtatatgaccaacagttaaatggggnattttataangcttttgcttctttcaggcaaaagttagagcaaggttgtctagaccactccagagaggccgnggaaaacacattagtcgtggggactatcgttctagtcggggatctggaatgatgatgcggccttcatggagccgacctgcaccncgttcttttccttctcgtagtgtaagaggagttggaagtcgtgcncnacctgtcagaccggttagtgtgagagatagacgccctatgatgnccataccagcaagaagtaggccagtgcctcctccatctagatcttatgataggagaccagttggtatgtggtatacaattattttaccaaatagactgattggttgttactattgttcattcttttnt

SEQ ID NO: 103 - DNA, 19 bp, synthetic construct
  source 1..19: mol_type = other DNA
acgggtttgttacatttgg

SEQ ID NO: 104 - DNA, 18 bp, synthetic construct
  source 1..18: mol_type = other DNA
cgggtttgttacgtttgg

SEQ ID NO: 105 - DNA, 19 bp, synthetic construct
  source 1..19: mol_type = other DNA
ctgctgctcgtaggaagga

SEQ ID NO: 106 - DNA, 22 bp, synthetic construct
  source 1..22: mol_type = other DNA
cacccaactctgtgcctgtaat

SEQ ID NO: 107 - DNA, 1004 bp, Glycine canescens
  source 1..1004: mol_type = genomic DNA
  variation 503: note = r is a or g
  variation 17: note = n is a, c, g, or t
  variation 35: note = n is a, c, g, or t
  variation 41: note = n is a, c, g, or t
  variation 64: note = n is a, c, g, or t
  variation 67: note = n is a, c, g, or t
  variation 126: note = n is a, c, g, or t
  variation 186: note = n is a, c, g, or t
  variation 336: note = n is a, c, g, or t
  variation 341: note = n is a, c, g, or t
  variation 365: note = n is a, c, g, or t
  variation 393: note = n is a, c, g, or t
  variation 401: note = n is a, c, g, or t
  variation 554: note = n is a, c, g, or t
  variation 563: note = n is a, c, g, or t
  variation 582: note = n is a, c, g, or t
  variation 686: note = n is a, c, g, or t
  variation 763: note = n is a, c, g, or t
  variation 799: note = n is a, c, g, or t
  variation 844: note = n is a, c, g, or t
  variation 851: note = n is a, c, g, or t
  variation 906: note = n is a, c, g, or t
  variation 936: note = n is a, c, g, or t
  variation 998: note = n is a, c, g, or t
aatggatttcaaacatntccgctgcacaacttctntgaaanaatgattagtttgagtattttcntantttaattgttattttcattttattaagtaatgtttattaagtttggttatttttaattnttattgttatttcaattgtctgtttcgttattttcattttattaagttgtgtttattatntctgtctctttgtctcatctcaattatcattattcacagtgtttaaatactacttagaattgcaaaattcaaaaaaaaaaaccttattttaaaaaaacaaacacatatgaattgataaatgatgaaagtctcaacatattttcaacaaanttgtnatttttaaaatgaactacattaanatacaactattcaaagaaacattagtanaaaatcangaaatagcatcacgattaggacaacctcttcgattatgtccaacttgcttgcaaattccgcatttgatgcgtcgttgacttgtttcaatttcgtccatctcagttacgtattctagtggaccttggacgaccatttgcacgcaacattttcctnttaggtatnagaactggatcttcactcngtggaatagcacgttcattaccaattggctgccatggcaatgagtaagcctgaaccaaattacttaccaggaagacatcattcacatactgataaggattttgncgaacatgtaaagcagcagctacggcgtgactacatgggtatttgaaggccttaaacttaccacactgacaaaaacnttccgcaagattgactgaatatgacctctcacaacnctcctccacctcaaataatgttttatcaacattatatgtgcgtanatggtgncctgtagcaaaggactgattatgcctcatagcatcaaccacatttttgcaatgtngttgtgaatggtcaacttgtgaaatagccntctgacccctgcttacaaaatattgaaccaatctattgtacgtgtgcttcaccagagcagtnatagg

SEQ ID NO: 108 - DNA, 16 bp, synthetic construct
  source 1..16: mol_type = other DNA
cgtccatctcattacg

SEQ ID NO: 109 - DNA, 16 bp, synthetic construct
  source 1..16: mol_type = other DNA
cgtccatctcgttacg

SEQ ID NO: 110 - DNA, 22 bp, synthetic construct
  source 1..22: mol_type = other DNA
tgatgcgtcgttgacttgtttc

SEQ ID NO: 111 - DNA, 18 bp, synthetic construct
  source 1..18: mol_type = other DNA
tgcgtgcaaatggtcgtc

SEQ ID NO: 112 - DNA, 1002 bp, Glycine canescens
  source 1..1002: mol_type = genomic DNA
  variation 501: note = r is a or g
  variation 285: note = n is a, c, g, or t
  variation 292: note = n is a, c, g, or t
  variation 363: note = n is a, c, g, or t
  variation 444: note = n is a, c, g, or t
  variation 474: note = n is a, c, g, or t
  variation 554: note = n is a, c, g, or t
  variation 685: note = n is a, c, g, or t
  variation 745: note = n is a, c, g, or t
  variation 787: note = n is a, c, g, or t
  variation 849: note = n is a, c, g, or t
  variation 894: note = n is a, c, g, or t
  variation 977: note = n is a, c, g, or t
attctgcctcattgcattaaaactaacttgtcgagtgtttatcagattctgcctgtgatgatttggagaaattttgaatcccattggtcctctaatgttttctctttttcttggttcctttatactaatataagtcaaaaaagataatttatgaaatttactcaaacaaaatcttggttgatgattcagagcagttactttgctctaaaaatatagctttgtagctagcatttgacaaaaaaatttaaataatactttttaaataaaaaattatcaatttgggancgttttnaaattatttacacttatggagcagtcaatcacgcctaatctggacgtgttcagtcacgcccaatttgggcntgattgacctgacccagtttatttaaacctcctctccaaattcatttcttcacaccttatcttctaaatcttctattattntattgtttattgatattaaaagttgttttngttgaagcaagaaatgaattcaggtgagtgagtgtgctcgtgttatgttattttctaatggaaggaaagctgaagcaaggntgacacgtatcaatcgaaactcaacagttggtgaattgcatcagaagatacgacaaaagttaggtctgaaggacaaccaatgtatcactttgttgacagcaagattatggcaacatgaacaatacatggantttcaagtactggatgataaagacataaaaacggttatggaagaatatttcaaccagtcnaggaaagattttttacaattgtacgttgattttaccggagcngaggatgttttatccatgaggtcagttgctttaaattctgcacataatacatcatcatatgntgttccagttgtaaacgtttctgaggaagacgaacataaccctanttgggttatggataacgatgaagaggatgacgatgatgaaaatattgcaatggaagatcgtcttcttgaggaggatgctagtncgtcggataatgatgagatttgtg

SEQ ID NO: 113 - DNA, 16 bp, synthetic construct
  source 1..16: mol_type = other DNA
cacactcaccacctga

SEQ ID NO: 114 - DNA, 17 bp, synthetic construct
  source 1..17: mol_type = other DNA
agcacactcatcacctg

SEQ ID NO: 115 - DNA, 25 bp, synthetic construct
  source 1..25: mol_type = other DNA
cctcctctccaaattcatttcttca

SEQ ID NO: 116 - DNA, 24 bp, synthetic construct
  source 1..24: mol_type = other DNA
ccttgcttcagctttccttccatt

SEQ ID NO: 117 - DNA, 1002 bp, Glycine canescens
  source 1..1002: mol_type = genomic DNA
  variation 501: note = r is a or g
  variation 113: note = n is a, c, g, or t
  variation 128: note = n is a, c, g, or t
  variation 141: note = n is a, c, g, or t
  variation 144: note = n is a, c, g, or t
  variation 148: note = n is a, c, g, or t
  variation 206: note = n is a, c, g, or t
  variation 323: note = n is a, c, g, or t
  variation 576: note = n is a, c, g, or t
  variation 627: note = n is a, c, g, or t
  variation 672: note = n is a, c, g, or t
  variation 722: note = n is a, c, g, or t
actagtacttagggattctttataacaaaaattaaaataaaaaaataccagacttcacttgtgagactgtattgagacaagtatgtctaaactaccaaatactataagcaaanttaagaaactaaagnaaaaccaaaatanttntttntaaaaaaaatagcaaaagaaaaagtagaaagaattagaataagaaaggagcaagcggnttgcacaaggaaaagtagtttacttgccagtctgtaatagaatcactacatttacaactagtcaaccatactacacatgcactgagaaaatgcaaggaatcaaacagctagctgttnttgttgttgctgcttttgatgagaagattcatcctcattgaagcacaagtgggcctttagtgattgtcctaaatttagggtggaatctgaaaaatttagaggttggatcaacaacatttctctttggagatggacacaataggcttggaaggtgcctggggtcacatttaaatggaaagcccaaaccaaagaggaaatccaactcaagaaaattcatctctattttggtgattcctccaactttggcatagtgngcattgttgtagaacctgaaaaatatcagaccacatgcacaaaaagagaanattaggtgaatatcatgtaaagtgtttttcttatagaaaattagnaagtcaaacatcaacaatatttggcatttgtttttctttaccattcaatnttccacaattgtagatatacggagtaaatgtactagtgagtgtataatatcttgagagggtttaatcttaaccacataattaaaaaatctaaatgaatgatgaagattaggtttaaataaaactaatgtcaactatttatacacatttttggtaaaaattggacttttatttttttgttacagtcaactatttatatatagtcatactatcaagttgattcttctcttttgttacatttccattaactagctcgctatttttttatgtatataatatat

SEQ ID NO: 118 - DNA, 20 bp, synthetic construct
  source 1..20: mol_type = other DNA
tttaaatggaaacccaaacc

SEQ ID NO: 119 - DNA, 18 bp, synthetic construct
  source 1..18: mol_type = other DNA
taaatggaagcccaaacc

SEQ ID NO: 120 - DNA, 22 bp, synthetic construct
  source 1..22: mol_type = other DNA
ggacacaataggcttggaaggt

SEQ ID NO: 121 - DNA, 22 bp, synthetic construct
  source 1..22: mol_type = other DNA
tgccaaagttggaggaatcacc

SEQ ID NO: 122 - DNA, 1005 bp, Glycine canescens
  source 1..1005: mol_type = genomic DNA
  variation 503: note = m is a or c
  variation 30..32: note = n is a, c, g, or t
  variation 69: note = n is a, c, g, or t
  variation 131: note = n is a, c, g, or t
  variation 243: note = n is a, c, g, or t
  variation 291: note = n is a, c, g, or t
  variation 387: note = n is a, c, g, or t
  variation 674: note = n is a, c, g, or t
  variation 704: note = n is a, c, g, or t
  variation 792: note = n is a, c, g, or t
  variation 879: note = n is a, c, g, or t
  variation 988: note = n is a, c, g, or t
gagttacacaccagttatatcaatcttaannntatgtatagaattataaataaaggaatatgttacaanatatttcaatatcaatatgtaaaatatcatgttgtacaaagttgtattctttcagccaatangtttgtctattaatacataattgtttaacaaacttatagtttttaaaagaatataaggcattagacttgattctgataacctgaaattattatttgaggttatgaactcatnataaaaacatatagggtttaattttaagacttaaacttgttgaaattnactttggtctgagagggtgggatatatcatgggtcataaaaatctctgttatttgctgtggcctaagatcaactattaatgatatgtttgtttgcncagtacgctgttaagaggaaggctgtgggtatttggggctgcaaagattgtggaaaagtgaaggctggaggtgcttacacattgaagtaagaatcttccttcactctgtattttacacgttaattgttttcttttttattgtggttgaagatatgatttgtttgtgcattttcttcttgacagtactgccagtgctgtcactgtccggagcaccattcggaggctgagagagcagactgagagttgaaagcagtttacacttttcatttgttttcaaagcttattttnaaattatcatacaattttgtcaggtctttnttaagaatattagtaatgtgcaactttaaagttctggaatgatatttagttttgtattcttgagtcattttgatggtgaaagaattantaatctttccttcttgttatgctactctttgatttgctaaacctgcattttgtctgcatctaagagaaaatatgctgtgtctgatcntttttctttacgatcattgtaacatgttgtagaggagtgctgacaacacacactttaacacacttttaaaacataatattattggctgaaattcatgaggtcccattantttggaaatgaaacaa

SEQ ID NO: 123 - DNA, 23 bp, synthetic construct
  source 1..23: mol_type = other DNA
cactctgtattttacagttaatt

SEQ ID NO: 124 - DNA, 21 bp, synthetic construct
  source 1..21: mol_type = other DNA
tctgtattttaccgttaattg

SEQ ID NO: 125 - DNA, 23 bp, synthetic construct
  source 1..23: mol_type = other DNA
aggctggaggtgcttacacattg

SEQ ID NO: 126 - DNA, 17 bp, synthetic construct
  source 1..17: mol_type = other DNA
tgctccggacagtgaca

SEQ ID NO: 127 - DNA, 1002 bp, Glycine canescens
  source 1..1002: mol_type = genomic DNA
  variation 501: note = r is a or g
  variation 87: note = n is a, c, g, or t
  variation 189: note = n is a, c, g, or t
  variation 892: note = n is a, c, g, or t
tttggatcccttcttgctgcatgcaagcttcacaaaaatatcaaacttggggaatgggcagcaaaacagtttctatcattggaaccncataaaagtgggtacaatgttctaatgtctaacatatatgcatcagcaaatagatggggtgatgttgcatatataaggagagctatgaaagatgaggggatngttaaagaaccgggtgttagctccattgaagtgaatggatcacttcatgaattcataatgggagatagggaacacccagatgctaaaaaagtttatgaaatgattgatgagatgagagaaaaactagaagatgctggatacaccccagatgtatcttgtgttctgcataacatagacaaggaaaagaaagaaagtgcgctcaactatcatagtgaaaaactggcaatggcctatggactgattagcacagctcctggtgttccaattagaatcgtgaagaatcttagagtttgtgatgattgtcacaatgcagaccaagttactgtccaagatttatgggagggagatcatagtgagggaccgcaatcgttttcatcactttaaagaaggatcttgttcttgttgtgattattggtaagaaaaactatacaaacagaagagtgttgtagacttgagttttcaaaacttgcaataggcagcatggaattgttcaaacatcacagataatgcagttgaagcattctaagagaggtggtcaaccatatatcttgtccacctacattgtagttcttgaccaaaaaattattaccaatgtaacataaccttatagtaaaatgataaaatgaagacttggtactttgcctagtctggcgtcatccaaaggggataaatcttcagatcttggccaggtacttttcttcaanctttgcagtgtgcactttgtgatatgcataattacttctttttttgtgtgtggtaatatgatttatttattgcgcttataattacaggaaaaggatctaagaatcgctt

SEQ ID NO: 128 - DNA, 18 bp, synthetic construct
  source 1..18: mol_type = other DNA
taacttggtcgcattgtg

SEQ ID NO: 129 - DNA, 19 bp, synthetic construct
  source 1..19: mol_type = other DNA
cagtaacttggttgcattg

SEQ ID NO: 130 - DNA, 21 bp, synthetic construct
  source 1..21: mol_type = other DNA
cacagctcctggtgttccaat

SEQ ID NO: 131 - DNA, 25 bp, synthetic construct
  source 1..25: mol_type = other DNA
cactatgatctccctcccataaatc

SEQ ID NO: 132 - DNA, 1004 bp, Glycine canescens
  source 1..1004: mol_type = genomic DNA
  variation 503: note = r is a or g
  variation 162: note = n is a, c, g, or t
  variation 301..302: note = n is a, c, g, or t
  variation 466: note = n is a, c, g, or t
  variation 539: note = n is a, c, g, or t
  variation 670: note = n is a, c, g, or t
  variation 719: note = n is a, c, g, or t
  variation 907: note = n is a, c, g, or t
  variation 951: note = n is a, c, g, or t
  variation 985: note = n is a, c, g, or t
tttcaagttggtgaatcttgacacaaattttaaggggttgtggatttttgtatattaagaatacatgagacaacaaatataattactaaaatgcagtaaaaactgaaagattaaaagtgtaaacttccatatgacccctatttgtatgtattcatgttcttnggacttatcttcattattgctaatttcagtttacaagggaaagagtatctgctcccaaggatagactcagtttcgaaggtgctttatacctctcaaactttaaaagtataggttattccataataataacacaacacannttccgaagggacacataatctcgagttccttgcaagaagctaattccacaagttggcctttgttaagcatctacaatctacacataccttctgttttttcatttcaaaatggaatgtgctgtcttgggcgtgcattttatgaaaatcggtgcttaatcctatgntgcatgaatacatttttctgattttttcttgaatgtagggttcctctcttctcaggatcattggtgcattattntttaattgaattacacagagctttgagtgactgctttttctttgctcaccagtaagtgtttttatttttgttggaactaattatttctgtttttatcagaaatggcgatacgtatgctggtgaatacttcncagataagatgcatggatttggggtatacagttttgctaatggccatcnttatgaaggatcctggcatgaagggaaaaggcaaggtcttggaatgtatacatttagaaatggagaaacccagtctggtcactggcaaaatggagtccttgacattccaagcacacagagtaccacctatcctgtttctcctgttggggtcaatcattccagagtacttaatgcagtgcaggtacacnctacattttatgatttagtttaccttaacatattgcttaatatnatttctcagtgtatcattaaagaaaaaagaagtnggcatagaatagtctggg

SEQ ID NO: 133 - DNA, 20 bp, synthetic construct
  source 1..20: mol_type = other DNA
tttcttgaatgtaggttcct

SEQ ID NO: 134 - DNA, 18 bp, synthetic construct
  source 1..18: mol_type = other DNA
tcttgaatgtgggttcct

SEQ ID NO: 135 - DNA, 22 bp, synthetic construct
  source 1..22: mol_type = other DNA
tcttgggcgtgcattttatgaa

SEQ ID NO: 136 - DNA, 21 bp, synthetic construct
  source 1..21: mol_type = other DNA
gcagtcactcaaagctctgtg

SEQ ID NO: 137 - DNA, 1004 bp, Glycine canescens
  source 1..1004: mol_type = genomic DNA
  variation 502: note = r is a or g
  variation 196: note = n is a, c, g, or t
  variation 373: note = n is a, c, g, or t
  variation 510: note = n is a, c, g, or t
  variation 601: note = n is a, c, g, or t
  variation 637: note = n is a, c, g, or t
  variation 699: note = n is a, c, g, or t
  variation 747: note = n is a, c, g, or t
  variation 802: note = n is a, c, g, or t
  variation 841: note = n is a, c, g, or t
tagggttggcacacaattcctcaatccgagctatgcagaaaattttgcctaacacaaggaatatttcaggtcaaatatataataataataaataacacaggaaaatattgacacagatcatgaaactaacattgcgaaaagatataaaacattatttgtcaagtaaaatgtatgtaggaaaaacaataagaactgnaaatagaaattaacttcataattaccacacagcctggcatcaggattctcagaatcagataaagcaagaccgatgacaattttttccaatgaagataactgcaatctgttacaaaaactttctaaaaagcattcattaatttctatattcttcattgactcagaaaacactgtactnaagtttagtttgtccaagaggtgcttaatgactgccccaagaattggctcatgctgcatgtctttcatatctcttctgacatagtcatagtgatccaagcaagtttgaagcagcaaaatgcatccagcaggttccaanttccgtgaactgtcagcagaagaacgaacacatcaataaccaatccaatcagagtgacaatacaaagaagattccaaatatgaatcaattnaaaaataaagagcaacctgaagcaaatctattaagntctctgccgaaaccaataaatgcctagtattagaaattagggtaattcaaaaggtagcaaancacaaaaacagagcactgaacaagacaggatatgaacaaagatgcaantccataaagcatggagaaaagtaataataatagcatagaactttccataggatgngtggcataaataaatcatggtgaaatgtgtcatatatanactcaaatactcatattatgaaccaccagaaaaagaaaaaaataaagattatcagtacagctaaatcacctacagcttaatcttctacaaaggcaaaacctcatcagttaataatttcataatcataacccaattcactagaacacagtagtgagcaatgtt

SEQ ID NO: 138 - DNA, 18 bp, synthetic construct
  source 1..18: mol_type = other DNA
aatgcatccagcagttcc

SEQ ID NO: 139 - DNA, 16 bp, synthetic construct
  source 1..16: mol_type = other DNA
catccagcggttccaa

SEQ ID NO: 140 - DNA, 21 bp, synthetic construct
  source 1..21: mol_type = other DNA
ccaagcaagtttgaagcagca

SEQ ID NO: 141 - DNA, 25 bp, synthetic construct
  source 1..25: mol_type = other DNA
ggattggttattgatgtgttcgttc

SEQ ID NO: 142 - DNA, 1002 bp, Glycine canescens
  source 1..1002: mol_type = genomic DNA
  variation 501: note = m is a or c
  variation 43: note = n is a, c, g, or t
  variation 282: note = n is a, c, g, or t
  variation 512: note = n is a, c, g, or t
  variation 525: note = n is a, c, g, or t
  variation 549: note = n is a, c, g, or t
  variation 589: note = n is a, c, g, or t
  variation 716: note = n is a, c, g, or t
  variation 762..763: note = n is a, c, g, or t
tttctttaatttttattgattttctttaatctttttctccctnacgcgtccttctcccttccttctttcagaaacctccattcacccacttcttttctctcaactgtcacgccctatgcatgagctaaataaattaacttattggagaagttaattaatctttcgttcttattttcttctcctaaaaaaagtacttatagagaaaagtttatccaaaaacagacatatatatatatatatcaacatttcatcagtaaaaagcaaaaacacacaaagaaaganacccaaatggaaagaaaaaaaaaaaggttttaaagatagaattttgacctcgagggctcttcgaaatctcttgtacttcctcaactctttaacgactcttgagagctcccacttggtgaggtgcctcccttcgttctcccattggttgagcacctctgcggaccccacttgggggttttggtggagagatatcctgcggtagacgtcgttccagcgcaacgatggggcggngctcgtaatcganggtgccgtagctgtggatcttggngatggagcacgtgagcaccgagaggcgggggtggaagcangtgtgagcatgggtgagagtgatggaggaagaagaagaagaagcaggaattgaatatggtgccataggatttataacattcacgtgtttaaccaacttagttaaatctctttaatacctactgcatntttagttttgactaattgtgctcaaaatatttttttgattgtaatnnactgaatttatattatagaatcagtgaggacggggacatggtgggtatacccaacccctaatggagacaaaagacatgtccatccacacccctgctctattgtcatttttattcacaacttatacacttttttttttgttttttcaacatctttttgtgttaaataattatatatttgaataagattaaaatacacttttataagtctctcattttattttatattttctaaatttaa

SEQ ID NO: 143 - DNA, 16 bp, synthetic construct
  source 1..16: mol_type = other DNA
ttccagcgcaagatgg

SEQ ID NO: 144 - DNA, 14 bp, synthetic construct
  source 1..14: mol_type = other DNA
cagcgcacgatggg

SEQ ID NO: 145 - DNA, 22 bp, synthetic construct
  source 1..22: mol_type = other DNA
ggagagatatcctgcggtagac

SEQ ID NO: 146 - DNA, 18 bp, synthetic construct
  source 1..18: mol_type = other DNA
ggtgctcacgtgctccat

SEQ ID NO: 147 - DNA, 1004 bp, Glycine canescens
  source 1..1004: mol_type = genomic DNA
  variation 503: note = r is a or g
  variation 10: note = n is a, c, g, or t
  variation 25: note = n is a, c, g, or t
  variation 113: note = n is a, c, g, or t
  variation 193..194: note = n is a, c, g, or t
  variation 277: note = n is a, c, g, or t
  variation 304: note = n is a, c, g, or t
  variation 360: note = n is a, c, g, or t
  variation 372: note = n is a, c, g, or t
  variation 435: note = n is a, c, g, or t
  variation 438: note = n is a, c, g, or t
  variation 440: note = n is a, c, g, or t
  variation 648: note = n is a, c, g, or t
  variation 650: note = n is a, c, g, or t
  variation 964: note = n is a, c, g, or t
gttactttgnccagtatttacaatntcatgcatgaaccaatccacaaaacattgatttacaaaaacctgtgacagcatcaaaataaataaaacaagataccaaaaaatatatngtaaacttccatattgtatatacagggagttacaaaacaaaggcttgatgagagtttagaccctgcaccgagagagagannacaaactggaaactaaaacttaagttagtacataaccctcaccgagtgaaggataattaaatgagaatcgaaacactacaggntggcacctaattacttgtaagattaanaatttgaaaagcctaagaacctgagaatattaatgcaacaataatctgaaatctgngttatatgcatnagaaaattagatatgtaaaagcatctaatttagcaaaatcctaaaagctttgtagtcttaaangancncaccaacaagacataattgataccccattccataggcaatagcttccagtgccttgagagccagaatgaaaatagtaatgtatttgaaactcaataaacattgtatggtaataggagacacccacttaaacatgaaatcaatatcaaatccacacaagcataaacttcggcaacctttgcctttgggttagggattggctatattaagnangaagggtggtaaaaccaggcacataaagaaccaactttaataattaaattccaattcagaaactcagtaacagactatactcaacccttttctgctaatctgttaatcacttgattgttgcattttcccaagatattgcaaaggcaactgatcttctaaggtccatgtcagtggaggtcaaccaattgtgtacaaatgattgaattggaatatggaaatctaagaagttaactagctaaggaaagatatcaatgcatctttagcattgtcttcgggtccccctcagcacaaaaaccttaaaagcatcaaatcantccagcaacaaatattaccagtgcattatgctttttacc

SEQ ID NO: 148 - DNA, 19 bp, synthetic construct
  source 1..19: mol_type = other DNA
ccttgagagccaaatgaaa

SEQ ID NO: 149 - DNA, 18 bp, synthetic construct
  source 1..18: mol_type = other DNA
ccttgagagccgaatgaa

SEQ ID NO: 150 - DNA, 24 bp, synthetic construct
  source 1..24: mol_type = other DNA
cattccataggcaatagcttccag

SEQ ID NO: 151 - DNA, 25 bp, synthetic construct
  source 1..25: mol_type = other DNA
aagtgggtgtctcctattaccatac

SEQ ID NO: 152 - DNA, 1002 bp, Glycine canescens
  source 1..1002: mol_type = genomic DNA
  variation 501: note = s is c or g
  variation 103: note = n is a, c, g, or t
  variation 302: note = n is a, c, g, or t
  variation 422: note = n is a, c, g, or t
  variation 663: note = n is a, c, g, or t
taatatggttcagtactgagcttgatattttggtcatggtttattgttctaaaaattatttccatgcgtgctatctgagtgttcatattgtatgacattgtgnattaaattaaatgatgtgtgactttggggtgctttattaaatgatgtgttgtatgacattctctgaatctcttacccgcattccaaaaatatatctcaattctcaaaaggatttctagaataaactacattattcttcaggcagcaaaaaaattagcatgtcataataaatatgccaaagctttccctttggtgtatanagctgtgagttattttttggctaatttttgcatggaccaatatgcagtactggttgatactggtccttctgattttctcaaggacaatacaaaggcagtgtttgtgatactcatacttantgtgatagccaagatgcattccatattgtctccaatcctgttttctagggcatgaccaagcacaatgatgtagattgtcgactatcagaaaagatccattctggagacatcataacttgttttgtcaatccaaatgctcaccaatcttttgagtggaccttggacaagttgttacttgttatctttgtaaactagctctggtcacatatgagctaatgcactagctttgacgggttgtgttnggaacatttattattctttgtccattgaatggcaactagaaagattgtatcttttttattattacatttattatataaatatggagtctgtggtgtagttgaaacacatttatggacatatgcttttgttctctctctccatgaacaatgtgtcaattttgggaaaagataaaggattgtgcgtattgttactgtggtattaaggaagattttttctttggtgtttggttgatgtaacaggatttgttttgatttgtatgatttcttttcttgctcagaattcctttcatctgaattagaagtcaaacgagcagtcattgagacctaaaaccaactcc

SEQ ID NO: 153 - DNA, 22 bp, synthetic construct
  source 1..22: mol_type = other DNA
caatgatgtagattgtcactat

SEQ ID NO: 154 - DNA, 21 bp, synthetic construct
  source 1..21: mol_type = other DNA
tgatgtagattgtgactatca

SEQ ID NO: 155 - DNA, 25 bp, synthetic construct
  source 1..25: mol_type = other DNA
atcctgttttctagggcatgaccaa

SEQ ID NO: 156 - DNA, 24 bp, synthetic construct
  source 1..24: mol_type = other DNA
acaacttgtccaaggtccactcaa

SEQ ID NO: 157 - DNA, 1002 bp, Glycine canescens
  source 1..1002: mol_type = genomic DNA
  variation 501: note = s is c or g
  variation 24: note = n is a, c, g, or t
  variation 461: note = n is a, c, g, or t
  variation 650: note = n is a, c, g, or t
  variation 722: note = n is a, c, g, or t
  variation 884: note = n is a, c, g, or t
  variation 988: note = n is a, c, g, or t
gtaagataatccagaatcacgtcnaaacaccaactaacccaatcttaagcaaatattcacatgttcagtttcacactggcaaatcaattctgagtccagaattgattgtgaattaaaacaaccttacctaactattacattattagataataaaaaaaaattatacagaattttactaccaacttacttttaaaataaaaaaaaattcaaacacaaatctctatcacttcaattaaacacaaacctcccccaatccatacctaaaatggtagtgtccaaggccatgcttaacgccccacttgaactccccgacatacctgctcccatcatcgcacgtgtgaaccccacacccatgactctgtccactcacccactccccggcataaacatccccggtgtagaaccggtacaccccgaacccgtgccgtaatccttgccggtactgccctcggtaccggctnccccgggcccacgtctccaccccgaatccatcgtacttccgcatccacccaatccccctcataccttccactcatactgtaatagtaaaccccactcccacaacacttccctcccttcagctccccctcgtacacgtcgccgttcgcgtagggcaccacggagaagcgaaggcccgcgggctgtggttgngcctggaccgggcctgggcgggctcccacggtccagaagattgggagtttgaggctgggccgggccttgggnttgaggttgaggaagaggcggagggaggggattcgagggagggcgaggttgagagagaacaagagcgcggcggagaaggagaaggcggagaggaaatcgaggaggaaggagtttgtgggatgggagacgaggaagtagaagaaggggagcgagaggaagagnaagaggcggagacggtggcggcggcggaggagggagagaacggtggcggcagcggcggcggcggtggtgacgtggcgtggtcttagggttgggaatttgtgtanggttggggatttg

SEQ ID NO: 158 - DNA, 18 bp, synthetic construct
  source 1..18: mol_type = other DNA
ttgggtggatgcgaagta

SEQ ID NO: 159 - DNA, 19 bp, synthetic construct
  source 1..19: mol_type = other DNA
ttgggtggatgggaagtac

SEQ ID NO: 160 - DNA, 18 bp, synthetic construct
  source 1..18: mol_type = other DNA
gaacccgtgccgtaatcc

SEQ ID NO: 161 - DNA, 24 bp, synthetic construct
  source 1..24: mol_type = other DNA
acagtatgagtggaaggtatgagg

SEQ ID NO: 162 - DNA, 1002 bp, Glycine canescens
  source 1..1002: mol_type = genomic DNA
  variation 501: note = r is a or g
  variation 2: note = n is a, c, g, or t
  variation 12: note = n is a, c, g, or t
  variation 36: note = n is a, c, g, or t
  variation 200: note = n is a, c, g, or t
  variation 278: note = n is a, c, g, or t
  variation 416: note = n is a, c, g, or t
  variation 570: note = n is a, c, g, or t
  variation 617: note = n is a, c, g, or t
  variation 670: note = n is a, c, g, or t
  variation 822: note = n is a, c, g, or t
  variation 832: note = n is a, c, g, or t
  variation 848: note = n is a, c, g, or t
  variation 875: note = n is a, c, g, or t
  variation 887..888: note = n is a, c, g, or t
  variation 892: note = n is a, c, g, or t
  variation 953: note = n is a, c, g, or t
  variation 989: note = n is a, c, g, or t
  variation 991: note = n is a, c, g, or t
tngatctcgctnttaaaagttctttctgcctccttngtggggttttgttttgtttcgattctcgttagggttttctcatcccttttcgatccccaattacccttttctttgatcattcagtgttttcttctctttcacttccaatttcgatttcctcgttaggtttttccttggaaccctcaatctcgcaaaaccagcgnttcaattcatcgttccctacaatctagggtttcgtttcgaaaatgcctccgaagacggcgaagcgagggtccgcgtcnagcgcctcgaagaggggtggcagaggtggcaggggaaccccgaaggctgcacagaaccaacagcaacatgaacctgcggaggagacagtgaaggttgaagagaaacaacagcccgtcgttgttgttgatgctgaggangaacagcagaaggtggtggtggaagaagagaatcctgctgttgaagagaaacagcttgtggttgaagagaacgaatctgctgtgagttgttgaggataaggctattgacatgaatcaaatggctccggaggctgtggaagaagcgtcccatgccnctaatgggttgagcgtggcgaaaagtaagtttcttttctttactctnaagtgattaagataagatttttagggtttcttttagttaggatgggggctggnggttgtgaagtttagggttttggttgtgtttccgagttgagattaaatttggttgtaatgaaggttttaaattgcaattgtggttatggtttcattgtgatccttgatattgcgggaaattggaacaaatgcggccagtgcggtcacttgcngttgcagttncgccacgatcattggnaaattgggacaaatgcagctgatgcgnttgctgttttgnncccntccttgatattgggacaaatgcagccaccaaaaattgggataatgtggctgcatcgccgcntctggttgcagttttgtctcaatccttgatattggngnaaattggggc

SEQ ID NO: 163 - DNA, 19 bp, synthetic construct
  source 1..19: mol_type = other DNA
cgaatctgctgtgattgtt

SEQ ID NO: 164 - DNA, 19 bp, synthetic construct
  source 1..19: mol_type = other DNA
aatctgctgtggttgttga

SEQ ID NO: 165 - DNA, 24 bp, synthetic construct
  source 1..24: mol_type = other DNA
gaaacagcttgtggttgaagagaa

SEQ ID NO: 166 - DNA, 22 bp, synthetic construct
  source 1..22: mol_type = other DNA
cggagccatttgattcatgtca

SEQ ID NO: 167 - DNA, 1002 bp, Glycine canescens
  source 1..1002: mol_type = genomic DNA
  variation 501: note = w is a or t
  variation 60: note = n is a, c, g, or t
  variation 71: note = n is a, c, g, or t
  variation 338: note = n is a, c, g, or t
  variation 456: note = n is a, c, g, or t
  variation 790: note = n is a, c, g, or t
tatttcaaaataatacaaatcatgtaaggacaattaataataaaataaaaatcaattaantttttaatctntcaatttttttaaattttaatttttagtccttaatttttttataactttagttctcctttgattttccatcagcattatagtccctttaacatttttatccatttttaatctttcattaatttttattgttcaaaattgatctccaaatataaaatatacaagagactaaaattggacaaaataaaaattaattttgaacaataaaaatagacaagacactgaaaatgaacaaatctttttgcagactaaaaattatatttcaaaanaattgagagacaacaaatttaattaactcacataaatagtcattaaaaaaagacaggtaataaacaaaacaggttgaaaggataataaacggaggttttaagatcgaaaccctactanggcaccacacttccactctcatttcatctctctctgtttctattatacatttcagagagagaagaagaagaagaagaagaagagcaatggcagcaacaacagagagcgagaagaagaagcaagaagaagaagaggaacaagaacaagtggttaacccatgggaagtttccgccaaaggcaaaatcgattacgacaaactcatcgaccgtttcggttgccagaagctcgacgaagccctaatttcgcgtctcgagcgcatcacctctcgcactccccacgtctttctacgacgcggcgttttcttcgcccaccggtacctccatccatttcctccnttcactccttcccttatttacttaaacggcaatttgatgatgtcgtttctttgtgtcgcagcgatttcgcggagattctggacgcgtatgagaggggagataggttctacttgtacaccggacgcggaccttcctccgaagccttgcatttgggacacttgattcccttcatgttcaccaagtgagtgagttattcgcgtttttcgatttt

SEQ ID NO: 168 - DNA, 21 bp, synthetic construct
  source 1..21: mol_type = other DNA
tctgtttctattaacatttca

SEQ ID NO: 169 - DNA, 21 bp, synthetic construct
  source 1..21: mol_type = other DNA
tctgtttctatttacatttca

SEQ ID NO: 170 - DNA, 20 bp, synthetic construct
  source 1..20: mol_type = other DNA
gcaccacacttccactctca

SEQ ID NO: 171 - DNA, 20 bp, synthetic construct
  source 1..20: mol_type = other DNA
tgctgccattgctcttcttc

SEQ ID NO: 172 - DNA, 1002 bp, Glycine canescens
  source 1..1002: mol_type = genomic DNA
  variation 501: note = r is a or g
  variation 413: note = n is a, c, g, or t
  variation 575: note = n is a, c, g, or t
  variation 581: note = n is a, c, g, or t
  variation 745: note = n is a, c, g, or t
  variation 949: note = n is a, c, g, or t
tccctatccacaaacagcaactgaaagtattcaattcagaacatcaacctctaaagtgaacaagaaaggtgacaaaagatcttgtctcgtaactccttgttaaactagggcttagcctcatcattaagtaatatataaggtagcaaacaaaggcctgtttggttaaaatgttatatgctttcacaaattaatacctctattttcactgtttcctgttttcaatggtttatacaagaaatagtgaaaatgggtttttcttctcttttttcctgtacaaacaaatctttggaaacaggaaagaaagtgaaaacaaggtgggaattttgtaattattagtgaaaacaaaaaatgttttttcaaaccaaacagaaccagaagaaaattaaaaaataccctggtcatgaaatatgtanaacatgtatttcatattctacagctataaagttgttcaatataaacttggtgaaggatactccccattcagagctcttgtttagtacaggagttaaaccaaaatacttcaaattcaggccacaataatcttttccacataattgaatcaaccaatatggttanacctgnaatcagaagaccataatgttagaatcaaattttaacaatagcatcctatcatgcataaaattttgattttatttaaataacagattaaaattaaagtaaaaaagcatatgtcaccaacctatgcagaagagagccatcccagtgcagtgttttagagcaccccncactgaaattttttttgtcttcccttcaagagatgaattttattaggcacaaagcatgatcatgttaccataagtatggaattttcagaataaatttcaattttataataattcaaccaaaattgcaaggtcagaaaatgaggataagaaaattcatcaaacagcactattaacttcaaatgccaaatataacaaacattgttntccaaagattgataacaacacaagcatagttaacgcaatgaagttctatatt

SEQ ID NO: 173 - DNA, 19 bp, synthetic construct
  source 1..19: mol_type = other DNA
tggtttaactccgtactaa

SEQ ID NO: 174 - DNA, 21 bp, synthetic construct
  source 1..21: mol_type = other DNA
tttggtttaactctgtactaa

SEQ ID NO: 175 - DNA, 23 bp, synthetic construct
  source 1..23: mol_type = other DNA
ttggtgaaggatactccccattc

SEQ ID NO: 176 - DNA, 25 bp, synthetic construct
  source 1..25: mol_type = other DNA
gtggaaaagattattgtggcctgaa

SEQ ID NO: 177 - DNA, 1003 bp, Glycine canescens
  source 1..1003: mol_type = genomic DNA
  variation 502: note = r is a or g
  variation 368: note = n is a, c, g, or t
  variation 932: note = n is a, c, g, or t
atggatcctaagttcaaatagattaatatttcatagtagactggataaaaataccttttaaaaacagcaataacattatttgatattttctgaaatgtttctaccttctgtgtggtttggccagtggagatatctcaattggatagtctaaaacaaatgtaggttggatgagctttggttctacaaaattctcaaaaacctaaataaacaaaacaaaaataatctgattagtgtgtgcacgtcaaattgactatataataaatgcaaaaagtgcaatcagaaaggaatatcaatatatcgatcatcacctaaaaagtgtaagtgtaattaattgcaaagatgactaacgttatcaaatgaaaagaatnaaaactggatgctcatatgacaggaagaaaaaatggggaagcaaatcaacctcattaaggaggtgaccaacggattggcatgcttcaatggaacctttatccttgttatcaagattctttccaagggtatccaagagtaactcgctttgcaacctcaagatcatttgccaattcattgaaatcgatcccagcagtttctttaacaagattgtgcatagtctccctcctccagggcttttccagacatatctcgactccctgtatggaatcattacacctctttcaacaaatttgttataaagaaagaaatttcaaaaagaaatgtcatcagtcatcactgatcaaacagcagtgcaagagaactgaggagtgcaagcaaaataattataaaaataagttcataaaattaaagcaaaaataatacaatgaggagtggtataggaaaattttaacattaaagaccatattgaggttcactgaaagccagtaaccagttcacttatggggaaaaggctttggagacactgaataaataaaacaagattgagaacttatttaccttttngataaaattattaaaaaaacattttttaaagaaaaaatcaatatggttttgatgatataaaccatacatt

SEQ ID NO: 178 - DNA, 20 bp, synthetic construct
  source 1..20: mol_type = other DNA
agcgagttactctggatacc

SEQ ID NO: 179 - DNA, 20 bp, synthetic construct
  source 1..20: mol_type = other DNA
agcgagttactttggatacc

SEQ ID NO: 180 - DNA, 21 bp, synthetic construct
  source 1..21: mol_type = other DNA
accaacggattggcatgcttc

SEQ ID NO: 181 - DNA, 25 bp, synthetic construct
  source 1..25: mol_type = other DNA
tgaattggcaaatgatcttgaggtt

SEQ ID NO: 182 - DNA, 1002 bp, Glycine canescens
  source 1..1002: mol_type = genomic DNA
  variation 501: note = r is a or g
  variation 4: note = n is a, c, g, or t
  variation 58: note = n is a, c, g, or t
  variation 73: note = n is a, c, g, or t
  variation 111: note = n is a, c, g, or t
  variation 190: note = n is a, c, g, or t
  variation 211: note = n is a, c, g, or t
  variation 272: note = n is a, c, g, or t
  variation 368: note = n is a, c, g, or t
  variation 627: note = n is a, c, g, or t
  variation 748: note = n is a, c, g, or t
  variation 768: note = n is a, c, g, or t
  variation 793: note = n is a, c, g, or t
  variation 827: note = n is a, c, g, or t
  variation 873: note = n is a, c, g, or t
  variation 875: note = n is a, c, g, or t
  variation 905: note = n is a, c, g, or t
  variation 957: note = n is a, c, g, or t
  variation 979: note = n is a, c, g, or t
atanaagaacgaaatttgcaaaattgagaaagtaggagaaaccaaatatgtaattaantctaacatttacatntcaacttgtaagatatttctgttcaaattcaataaatntaacaaagttactaaaagtgtcattttattgatgaatttgacaactcaggtcaattgatcttttttctataatgtgcgngtagatttttctatcacatangcaccaaatgccttaggttaagaggacaaaaatgaaaaatatttcttaaaaacaactcatntattacattaaaaagcataaaaagaaatcatttgataattcctttaacctatggtcttggagcataggataaaaaagtggcatataaatatcccanaccatgataatttcaaacattgttgttgttgttgttgttgttgcatcaaaccttttgcaaaatgtccatagcagaggaggagagtccaagtgtgatgccaaaagtgataactttcctctcctctcttcttgaagagggtggctgagtcaaatgatcacaaccaacacctccaacagcaccagaagatctcagtgttccatggcctgacaaggccaaacatctcaattcagtgctaccttgagagaatcttcaagtatgcnaattgcagcccctcgtgcttcgtcgtcgcctacgtctacctcgaccgattcactcagagacaaccctctttgcccatcaactccttcaacgtgcaccgtttgctcatcactagtgtcatgntagctgccaagttcatggangacatgtaagtggcttaataaattngttagtacccttgagaatattttcaaattctaanttttcttgattgttaaactttgatgtatatgtaagtatgtaacaananttgagttaactagttatgaatcgtgggtgntttaaaggcttgcaaagttagaatatcatgtttttgttgttctaacttctangtaagctgaaaatacaaagagnttgtttgatttcattctaactt

SEQ ID NO: 183 - DNA, 17 bp, synthetic construct
  source 1..17: mol_type = other DNA
agccaccctctcaagaa

SEQ ID NO: 184 - DNA, 18 bp, synthetic construct
  source 1..18: mol_type = other DNA
agccaccctttcaagaag

SEQ ID NO: 185 - DNA, 22 bp, synthetic construct
  source 1..22: mol_type = other DNA
cagaggaggagagtccaagtgt

SEQ ID NO: 186 - DNA, 22 bp, synthetic construct
  source 1..22: mol_type = other DNA
tgttggaggtgttggttgtgat

SEQ ID NO: 187 - DNA, 1002 bp, Glycine canescens
  source 1..1002: mol_type = genomic DNA
  variation 501: note = r is a or g
  variation 77: note = n is a, c, g, or t
  variation 86: note = n is a, c, g, or t
  variation 117: note = n is a, c, g, or t
  variation 138: note = n is a, c, g, or t
  variation 180: note = n is a, c, g, or t
  variation 201: note = n is a, c, g, or t
  variation 215: note = n is a, c, g, or t
  variation 328: note = n is a, c, g, or t
  variation 383: note = n is a, c, g, or t
  variation 441: note = n is a, c, g, or t
  variation 636: note = n is a, c, g, or t
  variation 669: note = n is a, c, g, or t
  variation 683: note = n is a, c, g, or t
  variation 693: note = n is a, c, g, or t
  variation 747: note = n is a, c, g, or t
  variation 756: note = n is a, c, g, or t
  variation 761..762: note = n is a, c, g, or t
  variation 852: note = n is a, c, g, or t
  variation 859: note = n is a, c, g, or t
  variation 955: note = n is a, c, g, or t
aatcgtgcaaacgctatctcaaaatcaaccatagagggagtataacctgcaaaataatcataccattaataatattntgtttacanatatatccattccatatattcaaaataattnttaaacatacctaaattcatnagggtcttcttcaatttttcattcctgaacctttgattaaanttattagcaatatgacgaagncaaaacacgtgatncgcataaggtggttgccaaccagcatgattctctacagcagataatatgctctggtgtctatctgaaatgagacatatgttttgcctttgggttacgtgtaagcgaatgttancaagaaagtattcccaagcttccaaagtctcatcttcaacaatggcaaatgccantggcagacattcattattaccatcctgagtcgtagcaatcaataattttcctttatanttgccatataaataagtcccatcaatttgaatcacgggtttgcaaaaattaaatgcctcagcaacactgtctgaaagtccagaaaatgcgatgaaacacacgttttgtctgtatcaatcgatgtccaacaaaatactcgtttgtttgaatatcataaaaagaacctggtgaaaaacgaagcatgtaggcacaccanctgggtaaaaatgcataagactcttcccaatcnccataaatcattgncattgctttntgcttcgcataccaggcctttcgatatgaaactttaaatccatacgaatggatnatcctctcntgaannaatgcaatcggcacagacagatcctccttaatcattcctaataatgaaattgtaacattcacattaagaatataccttaaagaaccattnttaaagncgtatagaagaaatttaaaaatacatacctactataagtgaagcaataacatcagcatcaaactgtctgtgaccctgtataatatgatcatttagncaattgtgttttccaccccatcttgaaacaagccacttcacaccgt

SEQ ID NO: 188 - DNA, 18 bp, synthetic construct
  source 1..18: mol_type = other DNA
ttaaatgcctcacaacac

SEQ ID NO: 189 - DNA, 16 bp, synthetic construct
  source 1..16: mol_type = other DNA
atgcctcgcaacactg

SEQ ID NO: 190 - DNA, 25 bp, synthetic construct
  source 1..25: mol_type = other DNA
ccatcaatttgaatcacgggtttgc

SEQ ID NO: 191 - DNA, 24 bp, synthetic construct
  source 1..24: mol_type = other DNA
gttggacatcgattgatacagaca

SEQ ID NO: 192 - DNA, 1002 bp, Glycine canescens
  source 1..1002: mol_type = genomic DNA
  variation 501: note = r is a or g
  variation 10: note = n is a, c, g, or t
  variation 64: note = n is a, c, g, or t
  variation 72: note = n is a, c, g, or t
  variation 102: note = n is a, c, g, or t
  variation 185: note = n is a, c, g, or t
  variation 387: note = n is a, c, g, or t
  variation 414: note = n is a, c, g, or t
  variation 570: note = n is a, c, g, or t
  variation 898: note = n is a, c, g, or t
ggctattgantggcatgcaacccattcatgttctttagatgagaaaatttgcatttatttttcngttttttntggttaaagttctatttcagttcatttgtntgttagtgtgctgtcatgagaatagtttcaactaggaattgtgagattgattatggggtgtggactaccctaatttaatgaangctatgatgctggaaaagtttggtctgttttgacggggatcatttggtatctttatttttgacagacgatgaagaggaggttaaggagtccatagatgaatatgagaaagatgaacgcttagatttggaggataatgatcctgagtatgaacctgaggagtatggtggagttgattatgatgagaaggaaattgaacaagangagggtcatgaggtaggaaatgaagtngaggaagaagaggctgaagataatgtaggtgaagaagagggtgatacaggtgaggaagaagtcgaagatgttcatgacgaacttgaagggtgaagaggagcatgagcatgagcatgagcatgctggtgaggagcatgagcatccagactttgctgangttgaggaagaggaacaccgtgaagttgtgaaggagaggcgaaagcggaaagaatttgaagtttttgttgggggcttggacaaggatgctactgagagtgatctgaggaaggcttttggtgaagttggggtggttacagagatcaggttgatgatgaaccctcagactaaaaagaacaagggatttgcattcttgcgttttgaaactgtggaacaagcaaaacgagctgtagcagagctaaaaaatccagtggtaattttttttatcttctcaatgttagaatagacttaaaactgaagccgtattaaattatgtgtttttcatcacnccaatttcagattaatggcaaacaatgtggtgtgactcctagtcaggacagtgataccctctatttgggaaacatatgcaagacatggacaaaggaagctgta

SEQ ID NO: 193 - DNA, 18 bp, synthetic construct
  source 1..18: mol_type = other DNA
tgacgaacttgaaggtga

SEQ ID NO: 194 - DNA, 18 bp, synthetic construct
  source 1..18: mol_type = other DNA
cgaacttgagggtgaaga

SEQ ID NO: 195 - DNA, 23 bp, synthetic construct
  source 1..23: mol_type = other DNA
ggtgaggaagaagtcgaagatgt

SEQ ID NO: 196 - DNA, 19 bp, synthetic construct
  source 1..19: mol_type = other DNA
ttcgcctctccttcacaac

SEQ ID NO: 197 - DNA, 1002 bp, Glycine canescens
  source 1..1002: mol_type = genomic DNA
  variation 501: note = r is a or g
  variation 58: note = n is a, c, g, or t
  variation 167: note = n is a, c, g, or t
  variation 203: note = n is a, c, g, or t
  variation 279: note = n is a, c, g, or t
  variation 323: note = n is a, c, g, or t
tagttcgagtaaaatacgagaagtactggcttaatttactcttgaaaaaaaagtgttngactcctgacgtgggtataacggtgaaatcccttgtgttgtgaattctttttgtgggcttatgttgtatcgtagcccttaccgtaccctaatttttctttcttcaaatngcgcgcgctcctcacttcgagtcttcgactttcctnctccgaccatctcgccggaatttcccgcggcggcgctccttgtcgccgcagcttctctctctactgaaaccctagngagagaaaattcaaaaaccatttctctactctgaaattcataanccctgaaattcaaaaaccctaattcccctgtcaagctcgtagcacagtcacagccatgtatggcggtggtgagtatcaaaaccatttccccttctcattctctttcttttgcttctgagatgtgaactcaattttctccctttggctgaatccacagatgaagtatcagctatagtaagttgacttgggttcacacacttgtaaagctggttatgctggtgaagatgctcccaaggctgtgtttccctctgtaagagttttctctactctttttacttttctaaagttttggatttgttgttgtgtttactgttttgctgatatcattttaccatttattggcctatagaataagaaatgttgttatgctctcagttaatagtgaagaggacactgacatttttctgtggtgataggctagttagtactgcttgatagtgaacttatgtatttttataatttataattgactagaataatttctggaaaatgtatgggtagtttgattgttgataataaattggtggttgtcttggcttgtgcaaacttaggttgtgggagcaattgatcaaatggatgttgatgaagcagataatggcgaaaacaactctgcctctgctccggaatcaaataataataatgttagaaatgctgattctgacaagaccaagggaaagag

SEQ ID NO: 198 - DNA, 20 bp, synthetic construct
  source 1..20: mol_type = other DNA
aacccaagtcaactactata

SEQ ID NO: 199 - DNA, 21 bp, synthetic construct
  source 1..21: mol_type = other DNA
tgaacccaagtcaattactat

SEQ ID NO: 200 - DNA, 21 bp, synthetic construct
  source 1..21: mol_type = other DNA
tctccctttggctgaatccac

SEQ ID NO: 201 - DNA, 23 bp, synthetic construct
  source 1..23: mol_type = other DNA
caccagcataaccagctttacaa

SEQ ID NO: 202 - DNA, 1002 bp, Glycine canescens
  source 1..1002: mol_type = genomic DNA
  variation 501: note = r is a or g
  variation 229: note = n is a, c, g, or t
  variation 269: note = n is a, c, g, or t
  variation 545: note = n is a, c, g, or t
  variation 575: note = n is a, c, g, or t
  variation 636: note = n is a, c, g, or t
  variation 641: note = n is a, c, g, or t
  variation 645: note = n is a, c, g, or t
  variation 750: note = n is a, c, g, or t
  variation 809: note = n is a, c, g, or t
  variation 823: note = n is a, c, g, or t
  variation 830: note = n is a, c, g, or t
  variation 854: note = n is a, c, g, or t
  variation 880: note = n is a, c, g, or t
  variation 933: note = n is a, c, g, or t
  variation 955: note = n is a, c, g, or t
  variation 996: note = n is a, c, g, or t
aatttactgtgctgactaacttccatcttcttgatttgcttccttaaactagcaccatatcgggtgcctgtaatttgacacagcataaacatcagtcatcacctcgtttttttagacacaataaaaaataaagtaaatttgtctctaacaggtaaaggggcatcaacatcaacaacaacaacaacaacccttgatttaatttgacatagaccatagtctagcattcaanattcactttagaataaacaccgaaacaaaaaataaaatanccaaaagattcaacaaagaatgcaaccaactacgtaccgtattttccaacaataccggccttcttggttctcttggtctggtcacatgcaccaaaaagaaaaaaaagaaaaaaaaaaaagaaacataaatcatgttaaaatctctaattagaagaaaccttaaaattccagaaatacataagaaatagacagagaaagagacagcaccatttttgagtggtaagagaagagagtatcgctgctacaagttagaggcgcggctgctgaagtagaaccntgaacgagggtttgttgcctgagtgagaanaataacaacgcttttgagggtaggtagaatcatgggcctattgcgacccatgtgtaagccnatacnaatnaattatttaatacacccattatttgcttggtgcacctccaaactttccaatatcccatttttacccttcttcttcctctctcccacctccctgaaccaccacatntgcgcgacctccaccactcaccccctctttcctccacgctgccagccttccacctcgtnaccacccagatccncacacgnaaaatgaagttgaataaggtgatncattatggattgtgtaatacgtagtntatatgttgttacagattgatcaatccataatgtagataagaattttaaattnatatgacaaagtctgcagggtncgatgtgtgaaatagacaaaaggaagaatggggtgtggtantgtta

SEQ ID NO: 203 - DNA, 21 bp, synthetic construct
  source 1..21: mol_type = other DNA
tggtaagagaagagatatcgc

SEQ ID NO: 204 - DNA, 21 bp, synthetic construct
  source 1..21: mol_type = other DNA
tggtaagagaagaggtatcgc

SEQ ID NO: 205 - DNA, 24 bp, synthetic construct
  source 1..24: mol_type = other DNA
gacagagaaagagacagcaccatt

SEQ ID NO: 206 - DNA, 21 bp, synthetic construct
  source 1..21: mol_type = other DNA
agccgcgcctctaacttgtag

SEQ ID NO: 207 - DNA, 1002 bp, Glycine canescens
  source 1..1002: mol_type = genomic DNA
  variation 501: note = r is a or g
acgtgtgtgtgtgtttttcagaaaaaagaatagtttaagattaactctatttagctacgttttttttttagctaggggatatgatggaaaattgaatgcatggttgctatatgttatctggttctgttgtttgagttgggattaggtgcctttcttcaattatggatagtttggacaatttgatagattttggctgagacgttgagtgcttctcagaagactaaaaagttaatggtcttcattttgagactgtcttcaattatggataaaggattattatttttgacatccctttttgctggttgcttgtaggttgaagaattgagaagcaaggggcttgatccgtatgcttatgaatgggacaaaactcacggtactaatcagctgcaagatatatacagaaatctaggaaatggtgaggaaaaaaatagtgagaatgaccacgtatctgtcgcgggaagaattgttgcaaggagggcatttggaaagcttgcctttctagactctaagagatgattcagggacgattcaggttttcttttgcactttttgttgctttttgtacattcatggtaactgttagagactatataaatatagtaagtggagatattatgagttattgtgagctgtatgtatttatgtaaattagggaaaccattgttcattgtagttgtgaagcatattataaataaaaagccttcattgtgtaaattaaacatgttggacttttgttaagtttatgatatgttacagtgtttctttgttcttattctagtcttaattgtaaattgcattttttattcatagataaggtagaaattgtctcctttatgtcaagtaaatgctacagagagctgctaactgaagttgttaaaatctattatttcagctctattgtgataaggagagactcataggtgagcagtttgaacagttaaaggcccatgttgatattggtgatatattaggtgtaagaggaacaataaaacgaacagaaaa

SEQ ID NO: 208 - DNA, 19 bp, synthetic construct
  source 1..19: mol_type = other DNA
ttgcctttctaactctaag

SEQ ID NO: 209 - DNA, 18 bp, synthetic construct
  source 1..18: mol_type = other DNA
tgcctttctgactctaag

SEQ ID NO: 210 - DNA, 19 bp, synthetic construct
  source 1..19: mol_type = other DNA
gcaaggagggcatttggaa

SEQ ID NO: 211 - DNA, 22 bp, synthetic construct
  source 1..22: mol_type = other DNA
cctgaatcgtccctgaatcatc

SEQ ID NO: 212 - DNA, 1002 bp, Glycine canescens
  source 1..1002: mol_type = genomic DNA
  variation 501: note = r is a or g
  variation 42: note = n is a, c, g, or t
  variation 50: note = n is a, c, g, or t
  variation 87: note = n is a, c, g, or t
  variation 124: note = n is a, c, g, or t
  variation 127: note = n is a, c, g, or t
  variation 142: note = n is a, c, g, or t
  variation 144: note = n is a, c, g, or t
  variation 173: note = n is a, c, g, or t
  variation 437: note = n is a, c, g, or t
  variation 483: note = n is a, c, g, or t
  variation 489: note = n is a, c, g, or t
  variation 497: note = n is a, c, g, or t
  variation 556: note = n is a, c, g, or t
  variation 569: note = n is a, c, g, or t
  variation 624: note = n is a, c, g, or t
  variation 635: note = n is a, c, g, or t
  variation 668: note = n is a, c, g, or t
  variation 883: note = n is a, c, g, or t
  variation 899: note = n is a, c, g, or t
  variation 933: note = n is a, c, g, or t
  variation 935: note = n is a, c, g, or t
  variation 977: note = n is a, c, g, or t
aggtttacgggtttccaatgttttccttcttacggatttccnatccgtangttgctttccatattatccatgtataattggccttangaattgtcaatctgtacccatgaacacccattcattnccnaaatcaacgtaaacnanaatgtcaaaaatgaaggcaagaacttacntggaggacaatggcggaactcaaatgattcaaccaaccacgaacgcccaacttctgtgttgcttaatggggaggcggagaagacgaacaggatgacaaaacaacatagaagagaagaaaaaagaaagcgtatgaatggtgtatgcgaaaaaaaaacactgtcattacttaaccacttttagcgtgggcattttcagtattacattattcaacattgggtgtataagcaaaagtgctgatgtaggaagcaaaacccagcttttgnctcagatgaagttgagacccattttatataagtgtatgcttcgacnattttncttgtganactagtttcccatcttcattgtatcaaagtcactattttggttggcagtgaaaaatcccnaaatggccaaacncctaaagcaacaaacaatccatgaacaatgatctcaaccaaagttgtattctccntgaaaaatacntcatcatcttgattttctactatgaccataatnttatattttttcattgaacaatttggtatgacttaatagtgtcagcattttgaattttgcttgagataccgacattgagacttcttattctgacctatctttctacgacagtaacaagtgatcttggagggttgagatttagataattagaccgctttttaatattcatcactataatttctacttacgtttctttcacaagtctcacgtctccnacaattgtctacaatnttatattggataaccatgcattgttccttcctcntnacttcttcgttcaacagcttgtggtagggaactatatggttnaaggacttgtaattcatcaagccc

SEQ ID NO: 213 - DNA, 20 bp, synthetic construct
  source 1..20: mol_type = other DNA
caatgaagatgggaaacagt

SEQ ID NO: 214 - DNA, 22 bp, synthetic construct
  source 1..22: mol_type = other DNA
tacaatgaagatgggaaatagt

SEQ ID NO: 215 - DNA, 21 bp, synthetic construct
  source 1..21: mol_type = other DNA
gcgtatgaatggtgtatgcga

SEQ ID NO: 216 - DNA, 24 bp, synthetic construct
  source 1..24: mol_type = other DNA
cactgccaaccaaaatagtgactt

SEQ ID NO: 217 - DNA, 1002 bp, Glycine canescens
  source 1..1002: mol_type = genomic DNA
  variation 501: note = w is a or t
  variation 488: note = n is a, c, g, or t
  variation 553: note = n is a, c, g, or t
  variation 577: note = n is a, c, g, or t
  variation 926: note = n is a, c, g, or t
  variation 949: note = n is a, c, g, or t
  variation 967: note = n is a, c, g, or t
  variation 977: note = n is a, c, g, or t
ttaataatgtgaatcctcaaacaacaacagccaaaaacattgatttctacaaagttaagatgaggaacaagacctgcacggagatggatgatctcgatttggagctatgaggggctcttcttggatcgtcggcattgaacgcggcaccattgtccttatgcgggtcctgtagggtttgagtttgaaaaagggaagaagggttacgtcgcctattccagaacaattattctagaatatgatacattttcagaacaactattccataatagaataagcacttcagaacctactctagaatacaaaaaattatatttcaatatagtcgttttggaatcgaggtacctagtaaaggactgttgtgtccactgaaatcttttgagaggtgtaggatgcaaaatgggaggtgaaggatataaatttccctttggatagaccttgattagaaattatagtatgggctttgtgaatatccaacgtataggatcttnagtagtgcatcaataggtaagtttaggcaatataatttgtttggagcatacttcaaattgagaggnaggtacatctaatagttaagggangtatgtttaacaattgcctaagttttttttttttttttttgagagcgattgcctaagtttactatgagacatatagaggtcgttgttgccatttaataataaccgaacaaaaataagccatttaacaatagaatgacactcaatttgtaactgttgagaaacaaaagttcaagtcgaatcttctaataggaagctgctcaagatcgagttgcaaatgtctctgttgtgtatcacgttatgacattgtataagctaacatactcaataaactccaattaacccgatatagatgttgttccatttaaactaattaatatgtagcacgaattataaattaaatgttatgctngctttgtctccattattatatcntataactttgctagtggntgtagaatcntgttctccctcacagacccggggg

SEQ ID NO: 218 - DNA, 20 bp, synthetic construct
  source 1..20: mol_type = other DNA
taaacttacctatgatgcac

SEQ ID NO: 219 - DNA, 20 bp, synthetic construct
  source 1..20: mol_type = other DNA
ctaaacttacctttgatgca

SEQ ID NO: 220 - DNA, 23 bp, synthetic construct
  source 1..23: mol_type = other DNA
atgggctttgtgaatatccaacg

SEQ ID NO: 221 - DNA, 24 bp, synthetic construct
  source 1..24: mol_type = other DNA
cctctcaatttgaagtatgctcca

SEQ ID NO: 222 - DNA, 1002 bp, Glycine canescens
  source 1..1002: mol_type = genomic DNA
  variation 501: note = r is a or g
  variation 303..304: note = n is a, c, g, or t
  variation 365: note = n is a, c, g, or t
  variation 380: note = n is a, c, g, or t
  variation 447: note = n is a, c, g, or t
  variation 587: note = n is a, c, g, or t
  variation 719: note = n is a, c, g, or t
  variation 733: note = n is a, c, g, or t
  variation 754: note = n is a, c, g, or t
  variation 769: note = n is a, c, g, or t
  variation 846: note = n is a, c, g, or t
  variation 853: note = n is a, c, g, or t
  variation 859..860: note = n is a, c, g, or t
  variation 903: note = n is a, c, g, or t
  variation 910: note = n is a, c, g, or t
  variation 932: note = n is a, c, g, or t
  variation 987..988: note = n is a, c, g, or t
aacgattgaaattgcaaatttcttaaaagtgggagaccaaatgtcttaattaaaaaatggaagattagaatcacaagctttttaaaaataaatgatgaaatgtcttaattaaaaaaataggaggattaaaattataaatttgaaaaaataactggacgaaaattacatttcagtctaaaaaatttaatttgctcattttctgtttaagctggtgaataattggaaaggtcctgaaaaaataaaagcatttctttggaaagttagtcatgaaagcattttgactaatgttagaaggaacatganngggatgaatgtagataacttgtgtgcaatttgtgagaaacatgaggaatatgttcttcatntgtttagggactatntggactctaaattggtgttgcaatttttcgttcgtacatggagtaacaatgctttctatctatgaancacggacacgtccaaaatcagagagaatcgcgtccgatatagcgacacacgtcagatacggtgtcggacacgcggtcaacaaactcgacacgttgaccgttttcgacacgcgaatttgaccgtgtccgacacggtcaatgncaattccgtgagaaaaaaaaattaaagatattaagtttcagaactcaccaattcgcgactttgcttcttcacccttcacggtttctcacttctcacttcttcacgctcaccaccgcgtcgttcgcttctacntccgacagttgttngcttcgaccgccgttctcacngtcgtcggcccgtcnttcgtgcctcaccagtcacaggtaagtgttcttgctttgctctgacctctcgccagtttgcttctattgtgtgatgnttccacnaaaccnntcgtttgcgtctatctctcgaccgctgtgcgcctgcacccacngaacccntaaatgggttttgctgttcacnctctcactctgaccaggcagtcaccgttctaaataaacccccaaatgcgtctcanngtctattgttagg

SEQ ID NO: 223 - DNA, 16 bp, synthetic construct
  source 1..16: mol_type = other DNA
caccgtatcgacgtgt

SEQ ID NO: 224 - DNA, 17 bp, synthetic construct
  source 1..17: mol_type = other DNA
caccgtattgacgtgtg

SEQ ID NO: 225 - DNA, 19 bp, synthetic construct
  source 1..19: mol_type = other DNA
cagagagaatcgcgtccga

SEQ ID NO: 226 - DNA, 16 bp, synthetic construct
  source 1..16: mol_type = other DNA
ttgaccgcgtgtccga

1.-17. (canceled)

18. A method of producing a soybean plant having increased resistance to ASR, the method comprising the steps of:
a) detecting in a population of soybean plants, the presence of an ASR resistance allele associated with increased ASR resistance, wherein the ASR resistance allele is linked to a chromosomal interval comprising SEQ ID NO: 1 or a portion thereof, and wherein the ASR resistance allele is any of the favorable ASR resistance alleles of Table 1 or a linked allele located within 20 cM, 10 cM, 5 cM, 1 cM, 0.5 cM thereof; and
b) selecting from the population of soybean plants, a selected soybean plant based on the presence of the ASR resistance allele of a) and exhibiting increased ASR resistance as compared to a control plant lacking said allele.

19. The method of claim 18, further comprising, assaying the selected soybean plant for resistance to ASR.

20.-23. (canceled)

24. The method of any one of claims 18-19, wherein said chromosomal interval, or portion thereof, associated with the ASR resistance allele was introgressed into the population of soybean plants from a soybean plant comprising the chromosomal interval, or portion thereof, and further comprising the ASR resistance allele.

25. A method of producing a soybean plant with enhanced ASR resistance comprising:
a) crossing a first soybean plant comprising an ASR resistance allele with a second soybean plant of a different genotype to produce one or more progeny plants; and
b) selecting a progeny soybean plant based on the presence of said ASR resistance allele at a locus genetically linked to a chromosomal interval comprising SEQ ID NO: 1 or a portion thereof,
wherein said ASR resistance allele confers enhanced resistance to ASR compared to a plant lacking said allele, and wherein the ASR resistance allele is any of the favorable ASR resistance alleles of Table 1 or a linked allele located within 20 cM, 10 cM, 5 cM, 1 cM, 0.5 cM thereof.

26. The method of claim 25, wherein said chromosomal interval is flanked by SNP marker 1850 and SNP marker 3656 of Table 1.

27. The method of claim 26, wherein said chromosomal interval is flanked by SNP marker 3115 and SNP marker 3347 of Table 1.

28. A method of identifying or selecting an ASR resistant soybean plant having an ASR resistance allele derived from Glycine canescens, the method comprising the steps of:
a. isolating nucleic acid from a soybean plant; and
b. detecting in the nucleic acid the presence of a molecular marker that associates with increased ASR resistance wherein the molecular marker is located within 20 cM, 10 cM, 5 cM, 1 cM, or 0.5 cM of a favorable marker as described in Table 1; and
c. identifying or selecting a soybean plant having the ASR resistance allele derived from Glycine canescens on the basis of the molecular marker detected in b).

28. The method of claim 25, wherein producing the progeny plant having increased ASR resistance comprises use of introgression of a chromosomal interval comprising SEQ ID NO: 1, or a portion thereof, from a wild Glycine species and/or chemically induced chromosome doubling.

29. A method of producing a Glycine soybean plant having increased resistance to Asian soybean rust (ASR), the method comprising the steps of:
a) wide crossing a Glycine max plant with a ASR resistant Glycine canescens plant comprising in its genome a chromosomal interval comprising SEQ ID NO: 1 or a portion thereof;
b) generating soybean pods from the cross of a);
c) isolating embryos from the pods of b) and placing said embryos onto embryo rescue medium, wherein there is no callus induction;
d) analyzing genomic nucleic acid isolated from the embryo of c) for the presence of an allele that associates with increased ASR resistance and is linked with or located within the chromosome interval comprising SEQ ID NO: 1 or the portion thereof, or a molecular marker linked thereto and located within 20 cM, 10 cM, 5 cM, 4 cM, 3 cM, 2 cM, 1 cM, or 0.5 cM thereof;
e) transferring the embryos of d) onto germination medium or elongation medium and collecting shoots from said embryos;
f) growing the collected shoots of e) on germination or elongation medium; and
g) transferring established shoots of f) to soil, thereby producing a soybean plant having increased resistance to ASR.

30. The method of claim 29, wherein the embryos and/or shoots are treated with a chromosome doubling agent in any one of steps e)-h) to create amphidiploid plants capable of being backcrossed with a domestic annual Glycine cultivar to produce at least one backcross generation (BC1), wherein the chromosome doubling agent is either colchicine or trifluralin.
